(19) United States
(12) Patent Application Publication
(10) Pub. No.: US 2024/0368602 A1
(43) Pub. Date: Nov. 7, 2024

(54) OLIGONUCLEOTIDES COMPRISING SEGMENTED GAP STRUCTURES

(71) Applicant: AusperBio Therapeutics Inc., San Mateo, CA (US)

(72) Inventors: Guofeng CHENG, Foster City, CA (US); Cheng Yong YANG, Foster City, CA (US)

(21) Appl. No.: 18/768,373

(22) Filed: Jul. 10, 2024

Related U.S. Application Data
(63) Continuation of application No. PCT/CN2023/000030, filed on Jan. 10, 2023.
(60) Provisional application No. 63/298,092, filed on Jan. 10, 2022.

(51) Int. Cl. C12N 15/113; A61P 31/20

(52) U.S. Cl. CPC C12N 15/1131; A61P 31/20; C12N 2310/321; C12N 2310/322; C12N 2310/3231; C12N 2310/3341; C12N 2310/341

(57) ABSTRACT

Disclosed herein are modified oligonucleotides comprising, from 5′ to 3′, 5′ W1-G1-S1-G2-W2 3′ (Formula I), wherein W1 is a 5′ wing segment, G1 is a first gap segment, S1 is a first separator segment, G2 is a second gap segment, W2 is a 3′ wing segment, and—is an internucleoside linkage, and wherein at least one nucleoside of the oligonucleotide is modified. Also provided are methods of making and using such modified oligonucleotides.

### RELATED APPLICATIONS

[0001] This application is a continuation of International Application No. PCT/2023/000030, filed Jan. 10, 2023, which claims the priority and benefit of U.S. Provisional Application No. 63/298,092, filed on Jan. 10, 2022, the contents of each of which are incorporated herein in its entirety.

### REFERENCE TO AN ELECTRONIC SEQUENCE LISTING

[0002] The contents of the electronic sequence listing (AUSB_001_02WO_SeqList_ST26.xml; Size: 6,541,014 bytes; and Date of Creation: Jun. 7, 2024) are herein incorporated by reference in its entirety.

### BACKGROUND

[0003] Hepatitis B is a viral disease transmitted parenterally by contaminated material such as blood and blood products, contaminated needles, sexually and vertically from infected or carrier mothers to their offspring. It is estimated by the World Health Organization that more than 2 billion people have been infected worldwide, with about 4 million acute cases per year, 1 million deaths per year, and 350-400 million chronic carriers (World Health Organization: Geographic Prevalence of Hepatitis B Prevalence, 2004. http://www.who.int/vaccines-surveillance/graphics/htmls/hepbprev.htm).

[0004] The virus, HBV, is a double-stranded hepatotropic virus which infects only humans and non-human primates. Viral replication takes place predominantly in the liver and, to a lesser extent, in the kidneys, pancreas, bone marrow and spleen (Hepatitis B virus biology. Microbiol Mol Biol Rev. 64:2000; 51-68.). Viral and immune markers are detectable in blood and characteristic antigen-antibody patterns evolve over time. The first detectable viral marker is HBsAg, followed by hepatitis B e antigen (HBeAg) and HBV DNA. Titers may be high during the incubation period, but HBV DNA and HBeAg levels begin to fall at the onset of illness and may be undetectable at the time of peak clinical illness (Hepatitis B virus infection-natural history and clinical consequences. N Engl J Med., 350:2004; 1118-1129). HBeAg is a viral marker detectable in blood and correlates with active viral replication, and therefore high viral load and infectivity (Hepatitis B e antigen—the dangerous end game of hepatitis B. N Engl J Med. 347:2002; 208-210). The presence of anti-HBsAb and anti-HBcAb (IgG) indicates recovery and immunity in a previously infected individual.

[0005] Currently the recommended therapies for chronic HBV infection by the American Association for the Study of Liver Diseases (AASLD) and the European Association for the Study of the Liver (EASL) include interferon alpha (INFα), pegylated interferon alpha-2a (Peg-IFN2a), entecavir, and tenofovir. The nucleoside and nucleotide therapies, entecavir and tenofovir, are successful at reducing viral load, but the rates of HBeAg seroconversion and HBsAg loss are even lower than those obtained using IFNa, therapy. Other similar therapies, including lamivudine (3TC), telbivudine (LdT), and adefovir are also used, but for nucleoside/nucleotide therapies in general, the emergence of resistance limits therapeutic efficacy.

[0006] Thus, there is a need in the art to discover and develop new anti-viral therapies. Additionally, there is a need for new anti-HBV therapies capable of increasing HBeAg and HBsAg seroconversion rates. Recent clinical research has found a correlation between seroconversion and reductions in HBeAg (Fried et al (2008) Hepatology 47:428) and reductions in HBsAg (Moucari et al (2009) Hepatology 49:1151). Reductions in antigen levels may have allowed immunological control of HBV infection because high levels of antigens are thought to induce immunological tolerance. Current nucleoside therapies for HBV are capable of dramatic reductions in serum levels of HBV but have little impact on HBeAg and HBsAg levels.

[0007] Antisense technology is emerging as an effective means for reducing the expression of specific gene products and may therefore prove to be uniquely useful in a number of therapeutic, diagnostic. Antisense therapy differs from nucleoside therapy in that it can directly target the transcripts for the HBV antigens and thereby reduce serum HBeAg and HBsAg levels. Because of the multiple, overlapping transcripts produced upon HBV infection, there is also an opportunity for a single antisense oligomer to reduce HBV DNA in addition to both HBeAg and HBsAg. Therefore, antisense technology is emerging as an effective means for reducing the expression of certain gene products and may therefore prove to be uniquely useful in a number of therapeutic, diagnostic, and research applications for the modulation of HBV.

[0008] HBV antisense oligonucleotides which possess a single gap segment flanked directly between a 5′ wing segment, and a 3′ wing segment have been developed (WO 2012/145697). However, many of the HBV antisense oligonucleotides with this structure exhibited minimal efficacy in reducing serum HBsAg level and/or caused safety concerns in Chronic Hepatitis B patients. Thus there exists a need in the art for improved HBV antisense oligonucleotides.

### SUMMARY

[0009] The present disclosure extends the principles of HBV antisense oligonucleotides by providing enhanced modified oligonucleotide structures that provide further segmented gap structures, with the use of one or more Separators.

[0010] The present disclosure is based, at least in part, on the finding that a discontinuous gap segment flanked between a 5′ wing segment and a 3′ wing segment in a modified oligonucleotide provides improved activity over conventional anti-sense oligonucleotides that have a continuous gap (e.g., reduction of serum HBsAg levels or HBeAg levels). One or more separator segments placed directly in between gap segments can provide improved activity of the anti-sense oligonucleotide, which is distinct from the current teachings in the art, which show that separator segments can lead to poor activity. The inventors have unexpectedly discovered that the placement of separator segments at specific positions of the full length anti-sense oligonucleotide provides improved activity, while separator segments in other positions results in reduced activity or no changes to activity. Further, only specific types of nucleoside modifications in the separator segments provide improved activity, while other types of nucleoside modifications in the separator segments results in reduced activity or no changes to activity. Without being bound by theory, the specific combination of nucleoside modification and positioning of the separator segment within the full length anti-sense oligonucleotide, improves binding and activity of RNAse H endonuclease, without compromising the complementarity to the HBV target sequence.

[0011] The present disclosure is based, at least in part, on the finding that specific nucleoside modifications of the 5′ wing segment and 3′ wing segment decrease in vivo toxicity (e.g., reduction in ALT levels, a proxy for liver toxicity, or CC30 (cytotoxic concentration to reduce cell viability by 30%)). The inventors have unexpectedly discovered specific types of modified nucleosides in the 5′ wing segment causes increased in vivo toxicity, whereas specific types of modified nucleosides in the 3′ wing segment decreased in vivo toxicity. Further, the positioning of the modified nucleosides within the 5′ wing segment and 3′ wing segment also contribute to in vivo toxicity. Without being bound by theory, the specific combination of nucleoside modification and positioning within the 5′ wing segment and the 3′ wing segment, contributes to the complementarity of the full length anti-sense oligonucleotide to the HBV target sequence. While the combination of specific types of modifications of at certain positions improves complementarity, other combinations of specific types of modifications and positions lowers complementarity, causing increased off-target binding, which ultimately leads to toxicity.

[0012] Provided herein are methods, compounds, and compositions for modulating expression of HBV mRNA and protein. In certain embodiments, compounds useful for modulating expression of HBV mRNA and protein are antisense compounds. In certain embodiments, the antisense compounds are antisense oligonucleotides.

[0013] In certain embodiments, modulation can occur in a cell or tissue. In certain embodiments, the cell or tissue is in an animal. In certain embodiments, the animal is a human. In certain embodiments, HBV mRNA levels are reduced. In certain embodiments, HBV DNA levels are reduced. In certain embodiments, HBV protein levels are reduced. In certain embodiments, HBV antigen levels are reduced. In certain embodiments, HBV s-antigen (HBsAg) levels are reduced. In certain embodiments, HBV e-antigen (HBeAg) levels are reduced. Such reduction can occur in a time-dependent manner or in a dose-dependent manner.

[0014] Also provided are methods, compounds, and compositions useful for preventing, treating, and ameliorating diseases, disorders, and conditions. In certain embodiments, such HBV related diseases, disorders, and conditions are liver diseases. In certain embodiments, such liver diseases, disorders, and conditions includes jaundice, liver cancer, liver inflammation, liver fibrosis, inflammation, liver cirrhosis, liver failure, diffuse hepatocellular inflammatory disease, hemophagocytic syndrome, serum hepatitis, HBV viremia, and liver disease-related transplantation. In certain embodiments, such HBV related diseases, disorders, and conditions are hyperproliferative diseases, disorders, and conditions. In certain embodiments such hyperproliferative diseases, disorders, and conditions include cancer as well as associated malignancies and metastases. In certain embodiments, such cancers include liver cancer and hepatocellular cancer (HCC).

[0015] Such diseases, disorders, and conditions can have one or more risk factors, causes, or outcomes in common. Certain risk factors and causes for development of liver disease or a hyperproliferative disease include growing older; tobacco use; exposure to sunlight and ionizing radiation; contact with certain chemicals; infection with certain viruses and bacteria; certain hormone therapies; family history of cancer; alcohol use; and certain lifestyle choices including poor diet, lack of physical activity, and/or being overweight. Certain symptoms and outcomes associated with development of a liver disease or a hyperproliferative disease include but are not limited to: flu-like illness, weakness, aches, headache, fever, loss of appetite, diarrhea, jaundice, nausea and vomiting, pain over the liver area of the body, clay- or grey-colored stool, itching all over, and dark-colored urine.

[0016] In certain embodiments, methods of treatment include administering a HBV antisense compound to an individual in need thereof. In certain embodiments, methods of treatment include administering a HBV antisense oligonucleotide to an individual in need thereof.

### BRIEF DESCRIPTION OF THE DRA WINGS

[0017] FIG. 1 provides a legend for the nucleoside modifications at each position of the sequences shown in FIG. 2. The column “Examples” describes each type of nucleoside modification.

[0018] FIG. 2 shows a table of exemplary modified oligonucleotides of the disclosure. The modifications at each position of the modified oligonucleotide sequences are read using the legend in FIG. 1. AUS1010 to AUS1714 (SEQ ID NO: 11 to SEQ ID NO: 666) represent the modified oligonucleotide sequences. AUS1233 (SEQ ID NO: 10), also referred to as AUS1138, is a reference modified oligonucleotide sequence.

[0019] FIG. 3 shows a schematic diagram for the solid-phase synthesis process used to produce the modified oligonucleotides.

[0020] FIG. 4 shows a schematic diagram of a modified oligonucleotide dosing regimen and HBsAg level sampling schedule for HBV Tg mice.

[0021] FIG. 5 shows a schematic diagram of a modified oligonucleotide dosing regimen and HBsAg level sampling schedule for C57BL/6 Tg mice.

[0022] FIG. 6 shows a schematic diagram of a modified oligonucleotide dosing regimen and lanine aminotransferase (ALT) and aspartate aminotransferase (AST) levels sampling schedule for C57BL/6 Tg mice.

[0023] FIG. 7 shows a schematic diagram of a modified oligonucleotide dosing regimen and HBsAg level sampling schedule for pAAV-1.2HBV-GTA HDI-HBV mice.

[0024] FIG. 8 shows a schematic diagram of a modified oligonucleotide dosing regimen and lanine aminotransferase (ALT) and aspartate aminotransferase (AST) levels sampling schedule for C57BL/6 Tg mice.

[0025] FIG. 9 shows a schematic diagram of an exemplary modified oligonucleotide dosing regimen and HBsAg level sampling schedule for pcDNA3.1-preS2-GTD HDI-HBV mice.

[0026] FIG. 10 shows a schematic diagram of an exemplary modified oligonucleotide dosing regimen and HBsAg level sampling schedule for pcDNA3.1-preS2-GTA HDI-HBV mice.

[0027] FIG. 11 shows a schematic diagram of an exemplary modified oligonucleotide dosing regimen and HBsAg level sampling schedule for GTA HBV Tg mice.

[0028] FIG. 12 shows a schematic diagram of an exemplary modified oligonucleotide dosing regimen and HBsAg level sampling schedule for GTD AAV-HBV Tg mice.

[0029] FIG. 13 shows a schematic diagram of an exemplary modified oligonucleotide dosing regimen and lanine aminotransferase (ALT) and aspartate aminotransferase (AST) levels sampling schedule for C57BL/6 Tg mice.

[0030] FIG. 14 represents Table 15.1, which shows the serum levels of HBsAg at days 3, 7, 10, 14, 21, and 28 in GT-C 1.0HBV transgenic mice following a 40 mg/kg subcutaneous treatment of the modified oligonucleotides AUS1233, AUS1683, AUS1684, AUS1685, AUS1220, AUS1322, AUS1323, or AUS1324. The mean values are expressed in log 10.

[0031] FIG. 15 represents Table 15.2, which shows the serum levels of HBsAg at days 3, 7, 10, 14, 21, and 28 in GT-C 1.0HBV transgenic mice following a 40 mg/kg subcutaneous treatment of the modified oligonucleotides AUS1169, AUS1171, AUS1170, AUS1168, or AUS1322. The mean values are expressed in log₁₀.

[0032] FIG. 16 represents Table 15.3, which shows the serum levels of HBsAg at days 3, 7, 10, 14, and 21 in GT-C 1.0HBV transgenic mice following a 30 mg/kg subcutaneous treatment of the modified oligonucleotides AUS1434, AUS1435, AUS1440, AUS1436, AUS1437, AUS1438, AUS1439, AUS1441, AUS1422, AUS1423, AUS1424, AUS1425, AUS1426, AUS1427, AUS1428, AUS1429, AUS1430, AUS1431, AUS1432, or AUS1433. The mean values are expressed in log 10.

[0033] FIG. 17 represents Table 15.4, which shows the serum levels of HBsAg at days 3, 7, 10, 14, and 21 in GT-C 1.0HBV transgenic mice following a 30 mg/kg subcutaneous treatment of the modified oligonucleotides AUS1463, AUS1466, AUS1476, AUS1472, AUS1489, or AUS1459. The mean values are expressed in log 10.

[0034] FIG. 18 represents Table 15.5, which shows the serum levels of HBsAg at days 3, 7, 10, 14, 21, and 28 in GT-C 1.0HBV transgenic mice following a 30 mg/kg subcutaneous treatment of the modified oligonucleotides AUS1492, AUS1495, AUS1494, AUS1493, AUS1482, or AUS1441. The mean values are expressed in log₁₀.

[0035] FIG. 19 represents Table 15.6, which shows the serum levels of HBsAg at days 3, 7, 10, 14, and 21 in GT-C 1.0HBV transgenic mice following a 40 mg/kg subcutaneous treatment of the modified oligonucleotides AUS1693, AUS1694, AUS1695, AUS1696, AUS1697, AUS1698, AUS1699, or AUS1700. The mean values are expressed in log₁₀.

[0036] FIG. 20 represents Table 15.7, which shows the serum levels of HBsAg at days 3, 7, 10, 14, 21, and 28 in GT-C 1.0HBV transgenic mice following treatment with modified oligonucleotides. Rows 1 and 2 show HBsAg levels following a 10 mg/kg subcutaneous dose of AUS1493 or AUS1233 on Day 0. Rows 3 and 4 show HBsAg levels following a 30 mg/kg subcutaneous dose of AUS1493 or AUS1233 on Day 0. The mean values are expressed in log 10.

[0037] FIG. 21 represents Table 16.1, which shows the serum levels of HBsAg at days 3, 7, 10, 14, 21, and 28 in GT-D HDI HBV mice following a 60 mg/kg subcutaneous treatment of the eASO compound AUS1683, AUS1684, AUS1685, AUS1220, AUS1322, AUS1323, or AUS1324. The mean values are expressed in log₁₀.

[0038] FIG. 22 represents Table 16.2, which shows the serum levels of HBsAg at days 3, 7, 10, 14, 21, and 28 in GT-D HDI HBV mice following a 60 mg/kg subcutaneous treatment of the eASO compound AUS1169, AUS1171, AUS1170, or AUS1168. The mean values are expressed in log₁₀.

[0039] FIG. 23 represents Table 16.3, which shows the serum levels of HBsAg at days 3, 7, 10, 14, and 21 in GT-D HDI HBV mice following a 60 mg/kg subcutaneous treatment of the eASO compound AUS1173, AUS1174, AUS1175, or AUS1176. The mean values are expressed in log 10.

[0040] FIG. 24 represents Table 16.4, which shows the serum levels of HBsAg at days 3, 7, 10, and 14 in GT-D HDI HBV mice following a 60 mg/kg subcutaneous treatment of the eASO compound AUS1173, AUS1177, AUS1178, AUS1179, AUS1180, AUS1181, AUS1182, AUS1194, AUS1184, AUS1185, AUS1186, AUS1187, AUS1188, AUS1189, AUS1190, AUS1191, AUS1192, AUS1193, AUS1183, AUS1239, AUS1325, AUS1326, AUS1327, AUS1328, AUS1329, AUS1175, AUS1361, or AUS1362. The mean values are expressed in log 10.

[0041] FIG. 25 represents Table 16.5, which shows the serum levels of HBsAg at days 3, 7, 10, 14, and 22 in GT-D HDI HBV mice following a 60 mg/kg subcutaneous treatment of the eASO compound AUS1322, AUS1382, AUS1383, AUS1384, or AUS1385. The mean values are expressed in log₁₀.

[0042] FIG. 26 represents Table 16.6, which shows the serum levels of HBsAg at days 3, 7, 10, 14, and 21 in GT-D HDI HBV mice following a 60 mg/kg subcutaneous treatment of the eASO compound AUS1322, AUS1388, AUS1389, AUS1390, AUS1392, AUS1393, AUS1396, AUS1403, AUS1409, AUS1411, AUS1413, AUS1414, or AUS1415. The mean values are expressed in log₁₀.

[0043] FIG. 27 represents Table 16.7, which shows the serum levels of HBsAg at days 3, 7, 10, and 14 in GT-D HDI HBV mice following a 60 mg/kg subcutaneous treatment of the eASO compound AUS1387, AUS1326, AUS1328, AUS1388, AUS1390, AUS1403, or AUS1360. The mean values are expressed in log 10.

[0044] FIG. 28 represents Table 16.8, which shows the serum levels of HBsAg at days 3, 7, 10, 14, and 21 in GT-D HDI HBV mice following a 40 mg/kg subcutaneous treatment of the eASO compound AUS1434, AUS1435, AUS1440, AUS1436, AUS1437, AUS1438, AUS1439, AUS1441, AUS1422, AUS1423, AUS1424, AUS1425, AUS1426, AUS1427, AUS1428, AUS1429, AUS1430, AUS1431, AUS1432, or AUS1433. The mean values are expressed in log 10.

[0045] FIG. 29 represents Table 16.9, which shows the serum levels of HBsAg at days 3, 7, 10, 14, and 21 in GT-D HDI HBV (1.5 ug/ml pcDNA3.1 preS2/S plasmid) mice following a 40 mg/kg subcutaneous treatment of the eASO compound AUS1444, AUS1458, AUS1459, AUS1460, AUS1461, AUS1462, AUS1463, AUS1464, AUS1465, AUS1466, AUS1467, AUS1468, AUS1469, AUS1470, AUS1471, AUS1472, AUS1473, AUS1474, AUS1475, AUS1476, AUS1477, AUS1478, AUS1479, AUS1480, AUS1481, AUS1482, AUS1483, AUS1488, AUS1489, AUS1490, AUS1443, AUS1444, or AUS1445. The mean values are expressed in log₁₀.

[0046] FIG. 30 represents Table 16.10, which shows the serum levels of HBsAg at days 3, 7, 10, 14, 21, and 28 in GT-D HDI HBV (1.5 ug/ml pcDNA3.1 preS2/S plasmid) mice following a 15 mg/kg or 45 mg/kg subcutaneous treatment of the eASO compound AUS1492, AUS1493, AUS1233, AUS1492, or AUS1493. The mean values are expressed in log 10.

[0047] FIG. 31 represents Table 16.11, which shows the serum levels of HBsAg at days 3, 7, 10, 14, 21, and 28 in GT-A HDI HBV (1.5 ug/ml pcDNA3.1 preS2/S plasmid) mice following a 40 mg/kg subcutaneous treatment of the eASO compound AUS1492, AUS1493, AUS1233, AUS1492, or AUS1493. The mean values are expressed in log 10.

[0048] FIG. 32 represents Table 16.12, which shows the serum levels of HBsAg at days 3, 7, 10, 14, and 21 in GT-A HDI HBV (1.5 ug/ml pcDNA3.1 preS2/S plasmid) mice following a 15 or 45 mg/kg subcutaneous treatment of the eASO compound AUS1441, AUS1466, AUS1472, AUS1488, or AUS1489. The mean values are expressed in log₁₀.

[0049] FIG. 33 represents Table 16.13, which shows the serum levels of HBsAg at days 3, 7, 10, 14, 21, and 28 in GT-D HDI HBV (1.5 ug/ml pcDNA3.1 preS2/S plasmid) mice following a 15 or 45 mg/kg subcutaneous treatment of the eASO compound AUS1495, AUS1494, AUS1233, AUS1495, AUS1494, AUS1492, or AUS1441. The mean values are expressed in log 10.

[0050] FIG. 34 represents Table 16.14, which shows the serum levels of HBsAg at days 3, 7, 10, 14, 21, and 28 in GT-A HDI HBV (1.5 ug/ml pcDNA3.1 preS2/S plasmid) mice following a 15 or 45 mg/kg subcutaneous treatment of the eASO compound AUS1495, AUS1494, AUS1233, AUS1495, AUS1494, AUS1492, AUS1482, or AUS1441. The mean values are expressed in log 10.

[0051] FIG. 35 represents Table 16.15, which shows the serum levels of HBsAg at days 3, 7, 10, 14, and 21 in GT-B HDI HBV (0.5 ug/ml pcDNA3.1 preS2/S plasmid) mice following a 40 mg/kg subcutaneous treatment of the eASO compound AUS1684. The mean values are expressed in log 10.

[0052] FIG. 36 represents Table 16.16, which shows the serum levels of HBsAg at days 3, 7, 10, 14, 21, and 28 in GT-A 1.2HBV mice following a 45 mg/kg subcutaneous treatment of the eASO compound AUS1492 or AUS1493. The mean values are expressed in log 10.

[0053] FIG. 37 represents Table 16.17, which shows the serum levels of HBsAg at days 3, 7, 10, 14, and 21 in GT-A HDI HBV (1.5 ug/ml pAAV-1.2HBV plasmid) mice following a 40 mg/kg subcutaneous treatment of the eASO compound AUS1396, AUS1422, AUS1423, AUS1424, AUS1425, AUS1426, AUS1427, AUS1428, AUS1429, AUS1430, AUS1431, AUS1432, or AUS1433. The mean values are expressed in log 10.

[0054] FIG. 38 represents Table 16.18, which shows the serum levels of HBsAg at days 3, 7, 10, 14, and 21 in GT-A HDI HBV (1.5 ug/ml pAAV-1.2HBV plasmid) mice following a 40 mg/kg subcutaneous treatment of the eASO compound AUS1444, AUS1458, AUS1459, AUS1460, AUS1461, AUS1462, AUS1463, AUS1464, AUS1465, AUS1466, AUS1467, AUS1468, AUS1469, AUS1470, AUS1471, AUS1472, AUS1473, AUS1474, AUS1475, AUS1476, AUS1477, AUS1478, AUS1479, AUS1480, AUS1481, AUS1482, AUS1483, AUS1488, AUS1489, AUS1490, AUS1443, or AUS1434. The mean values are expressed in log 10.

[0055] FIG. 39 represents Table 17, which shows the serum levels of HBsAg, HBeAg, and HBV DNA at days 3, 7, 10, 14, 21, and 28 in GT-D AAV HBV (rAAV-HBV1.3-mer WT replicon) mice following a 40 mg/kg subcutaneous treatment of the eASO compound AUS1493. The mean values are expressed in log₁₀.

[0056] FIG. 40 represents Table 18.1 which shows the serum levels of ALT in WT male C57BL/6 mice at days 5, 7, 10, 14, 17, and 21 following a 60 mg/kg subcutaneous treatment of the eASO compound AUS1434, AUS1435, AUS1440, AUS1436, AUS1437, AUS1438, AUS1439, AUS1441, AUS1178, AUS1190, AUS1188, AUS1192, AUS1422, AUS1423, AUS1424, AUS1425, AUS1426, AUS1427, AUS1428, AUS1429, AUS1430, AUS1431, AUS1432, AUS1433, AUS1360, AUS1401, AUS1361, AUS1362, or AUS1411 on days 0, 2, and 4.

[0057] FIG. 41 represents Table 18.2 which shows the serum levels of ALT in WT male C57BL/6 mice at days 5, 7, 10, 14, 17, and 21 following a 60 mg/kg subcutaneous treatment of the eASO compound AUS1443, AUS1444, AUS1445, AUS1446, AUS1447, AUS1448, AUS1449, AUS1450, AUS1452, AUS1453, AUS1454, AUS1455, AUS1456, or AUS1457 on days 0, 2, and 4.

### DETAILED DESCRIPTION

[0058] It is to be understood that both the foregoing general description and the following detailed description are exemplary and explanatory only and are not restrictive of the invention, as claimed. Herein, the use of the singular includes the plural unless specifically stated otherwise. As used herein, the use of “or” means “and/or” unless stated otherwise. Furthermore, the use of the term “including” as well as other forms, such as “includes” and “included”, is not limiting. Also, terms such as “element” or “component” encompass both elements and components comprising one unit and elements and components that comprise more than one subunit, unless specifically stated otherwise.

[0059] The section headings used herein are for organizational purposes only and are not to be construed as limiting the subject matter described. All documents, or portions of documents, cited in this application, including, but not limited to, patents, patent applications, articles, books, and treatises, are hereby expressly incorporated by reference for the portions of the document discussed herein, as well as in their entirety.

### Definitions

[0060] Unless specific definitions are provided, the nomenclature utilized in connection with, and the procedures and techniques of, analytical chemistry, synthetic organic chemistry, and medicinal and pharmaceutical chemistry described herein are those well known and commonly used in the art. Standard techniques may be used for chemical synthesis, and chemical analysis. Where permitted, all patents, applications, published applications and other publications, GENBANK Accession Numbers and associated sequence information obtainable through databases such as National Center for Biotechnology Information (NCBI) and other data referred to throughout in the disclosure herein are incorporated by reference for the portions of the document discussed herein, as well as in their entirety.

[0061] Unless otherwise indicated, the following terms have the following meanings:

[0062] “2′-O-methoxyethyl” (also 2′-MOE and 2′-O(CH₂)₂—OCH₃) refers to an O-methoxy-ethyl modification at the 2′ position of a furanose ring. A 2′-O-methoxyethyl modified sugar is a modified sugar.

[0063] “2′-MOE nucleoside” (also 2′-O-methoxyethyl nucleoside) means a nucleoside comprising a 2′-MOE modified sugar moiety.

[0064] “2′-substituted nucleoside” means a nucleoside comprising a substituent at the 2′-position of the furanosyl ring other than H or OH. In certain embodiments, 2′ substituted nucleosides include nucleosides with bicyclic sugar modifications.

[0065] “3′ target site” refers to the nucleotide of a target nucleic acid which is complementary to the 3′-most nucleotide of a particular antisense compound.

[0066] “5′ target site” refers to the nucleotide of a target nucleic acid which is complementary to the 5′-most nucleotide of a particular antisense compound.

[0067] “5-methylcytosine” means a cytosine modified with a methyl group attached to the 5 position. A 5-methylcytosine is a modified nucleobase.

[0068] “About” means within +7% of a value. For example, if it is stated, “the compounds affected at least about 70% inhibition of HBV”, it is implied that the HBV levels are inhibited within a range of 63% and 77%.

[0069] “Acceptable safety profile” means a pattern of side effects that is within clinically acceptable limits.

[0070] “Active pharmaceutical agent” means the substance or substances in a pharmaceutical composition that provide a therapeutic benefit when administered to an individual. For example, in certain embodiments an antisense oligonucleotide targeted to HBV is an active pharmaceutical agent.

[0071] “Active target region” means a target region to which one or more active antisense compounds is targeted. “Active antisense compounds” means antisense compounds that reduce target nucleic acid levels or protein levels.

[0072] “Acute hepatitis B infection” results when a person exposed to the hepatitis B virus begins to develop the signs and symptoms of viral hepatitis. This period of time, called the incubation period, is an average of 90 days, but could be as short as 45 days or as long as 6 months. For most people this infection will cause mild to moderate discomfort but will go away by itself because of the body's immune response succeeds in fighting the virus. However, some people, particularly those with compromised immune systems, such as persons suffering from AIDS, undergoing chemotherapy, taking immunosuppressant drugs, or taking steroids, have very serious problems as a result of the acute HBV infection, and go on to more severe conditions such as fulminant liver failure.

[0073] “Administered concomitantly” refers to the co-administration of two agents in any manner in which the pharmacological effects of both are manifest in the patient at the same time. Concomitant administration does not require that both agents be administered in a single pharmaceutical composition, in the same dosage form, or by the same route of administration. The effects of both agents need not manifest themselves at the same time. The effects need only be overlapping for a period of time and need not be coextensive.

[0074] “Administering” means providing a pharmaceutical agent to an individual, and includes, but is not limited to administering by a medical professional and self-administering.

[0075] “Agent” means an active substance that can provide a therapeutic benefit when administered to an animal. “First Agent” means a therapeutic compound described herein. For example, a first agent can be an antisense oligonucleotide targeting HBV. “Second agent” means a second therapeutic compound described herein (e.g. a second antisense oligonucleotide targeting HBV) and/or a non-HBV therapeutic compound.

[0076] “Amelioration” refers to a lessening of at least one indicator of the severity of a condition or disease. The severity of indicators may be determined by subjective or objective measures which are known to those skilled in the art.

[0077] “Animal” refers to a human or non-human animal, including, but not limited to, mice, rats, rabbits, dogs, cats, pigs, and non-human primates, including, but not limited to, monkeys and chimpanzees.

[0078] “Antibody” refers to a molecule characterized by reacting specifically with an antigen in some way, where the antibody and the antigen are each defined in terms of the other. Antibody may refer to a complete antibody molecule or any fragment or region thereof, such as the heavy chain, the light chain, Fab region, and Fe region.

[0079] “Antisense activity” means any detectable or measurable activity attributable to the hybridization of an antisense compound to its target nucleic acid. In certain embodiments, antisense activity is a decrease in the amount or expression of a target nucleic acid or protein encoded by such target nucleic acid.

[0080] “Antisense compound” means an oligomeric compound that is capable of undergoing hybridization to a target nucleic acid through hydrogen bonding. Examples of antisense compounds include single-stranded and double-stranded compounds, such as, antisense oligonucleotides, siRNAs, shRNAs, snoRNAs, miRNAs, and satellite repeats.

[0081] “Antisense inhibition” means reduction of target nucleic acid levels in the presence of an antisense compound complementary to a target nucleic acid compared to target nucleic acid levels in the absence of the antisense compound.

[0082] “Antisense mechanisms” are all those mechanisms involving hybridization of a compound with target nucleic acid, wherein the outcome or effect of the hybridization is either target degradation or target occupancy with concomitant stalling of the cellular machinery involving, for example, transcription or splicing.

[0083] “Antisense oligonucleotide” means a single-stranded oligonucleotide having a nucleobase sequence that permits hybridization to a corresponding region or segment of a target nucleic acid.

[0084] The “area under the curve” or “AUC” is the integral of the concentration of a drug in blood plasma as a function of time. The AUC can be determined for the totality of time for which data is available, for example until the drug is no longer detectable (AUC₀₋ₜ), the area under the curve from time 0 extrapolated to infinity (AUC_{0-¥}), or for a particular truncated window of time, for example 24 hours after administration (AUC₀₋₂₄).

[0085] “Base complementarity” refers to the capacity for the precise base pairing of nucleobases of an antisense oligonucleotide with corresponding nucleobases in a target nucleic acid (i.e., hybridization), and is mediated by Watson-Crick, Hoogsteen or reversed Hoogsteen hydrogen binding between corresponding nucleobases.

[0086] “Bicyclic sugar” means a furanose ring modified by the bridging of two non-geminal carbon atoms. A bicyclic sugar is a modified sugar.

[0087] “Body weight” refers to an animal's whole body weight, inclusive of all tissues including adipose tissue.

[0088] “Cap structure” or “terminal cap moiety” means chemical modifications, which have been incorporated at either terminus of an antisense compound.

[0089] “cEt” or “constrained ethyl” means a bicyclic sugar moiety comprising a bridge connecting the 4′-carbon and the 2′-carbon, wherein the bridge has the formula: 4′-CH(CH₃)—O-2′.

[0090] “Constrained ethyl nucleoside” (also cEt nucleoside) means a nucleoside comprising a bicyclic sugar moiety comprising a 4′-CH(CH₃)—O-2′ bridge.

[0091] “Chemically distinct region” refers to a region of an antisense compound that is in some way chemically different than another region of the same antisense compound. For example, a region having 2′-O-methoxyethyl nucleotides is chemically distinct from a region having nucleotides without 2′-O-methoxyethyl modifications.

[0092] “Chimeric antisense compounds” means antisense compounds that have at least 2 chemically distinct regions, each position having a plurality of subunits.

[0093] “Chronic hepatitis B infection” occurs when a person initially suffers from an acute infection but is then unable to fight off the infection. Whether the disease becomes chronic or completely resolves depends mostly on the age of the infected person. About 90% of infants infected at birth will progress to chronic disease. However, as a person ages, the risk of chronic infection decreases such that between 20%-50% of children and less than 10% of older children or adults will progress from acute to chronic infection. Chronic HBV infections are the primary treatment goal for embodiments of the present invention, although ASO compositions of the present invention are also capable of treating HBV-related conditions, such as inflammation, fibrosis, cirrhosis, liver cancer, serum hepatitis, and more.

[0094] “Co-administration” means administration of two or more pharmaceutical agents to an individual. The two or more pharmaceutical agents may be in a single pharmaceutical composition, or may be in separate pharmaceutical compositions. Each of the two or more pharmaceutical agents may be administered through the same or different routes of administration. Co-administration encompasses administration in parallel or sequentially.

[0095] “Complementarity” means the capacity for pairing between nucleobases of a first nucleic acid and a second nucleic acid.

[0096] “Comply” means the adherence with a recommended therapy by an individual.

[0097] “Comprise,” “comprises” and “comprising” will be understood to imply the inclusion of a stated step or element or group of steps or elements but not the exclusion of any other step or element or group of steps or elements.

[0098] “Contiguous nucleobases” means nucleobases immediately adjacent to each other.

[0099] “Cure” means a method or course that restores health or a prescribed treatment for an illness.

[0100] “Deoxyribonucleotide” means a nucleotide having a hydrogen at the 2′ position of the sugar portion of the nucleotide. Deoxyribonucleotides may be modified with any of a variety of substituents.

[0101] “Designing” or “Designed to” refer to the process of designing an oligomeric compound that specifically hybridizes with a selected nucleic acid molecule.

[0102] “Diluent” means an ingredient in a composition that lacks pharmacological activity, but is pharmaceutically necessary or desirable. For example, in drugs that are injected, the diluent may be a liquid, e.g. saline solution.

[0103] “Dosage unit” means a form in which a pharmaceutical agent is provided, e.g. pill, tablet, or other dosage unit known in the art.

[0104] “Dose” means a specified quantity of a pharmaceutical agent provided in a single administration, or in a specified time period. In certain embodiments, a dose may be administered in two or more boluses, tablets, or injections. For example, in certain embodiments, where subcutaneous administration is desired, the desired dose requires a volume not easily accommodated by a single injection. In such embodiments, two or more injections may be used to achieve the desired dose. In certain embodiments, a dose may be administered in two or more injections to minimize injection site reaction in an individual. In other embodiments, the pharmaceutical agent is administered by infusion over an extended period of time or continuously. Doses may be stated as the amount of pharmaceutical agent per hour, day, week or month.

[0105] “Dosing regimen” is a combination of doses designed to achieve one or more desired effects.

[0106] “Duration” means the period of time during which an activity or event continues. In certain embodiments, the duration of treatment is the period of time during which doses of a pharmaceutical agent are administered.

[0107] “Effective amount” in the context of modulating an activity or of treating or preventing a condition means the administration of that amount of active ingredient to a subject in need of such modulation, treatment or prophylaxis, either in a single dose or as part of a series, that is effective for modulation of that effect, or for treatment or prophylaxis or improvement of that condition. The effective amount will vary depending upon the health and physical condition of the subject to be treated, the taxonomic group of subjects to be treated, the formulation of the composition, the assessment of the medical situation, and other relevant factors.

[0108] “Efficacy” means the ability to produce a desired effect.

[0109] “Expression” includes all the functions by which a gene's coded information is converted into structures present and operating in a cell. Such structures include, but are not limited to the products of transcription and translation.

[0110] The term “fragment,” as applied to a polynucleotide, will be understood to mean a nucleotide sequence of reduced length relative to a reference nucleic acid or nucleotide sequence and comprising, consisting essentially of, and/or consisting of a nucleotide sequence of contiguous nucleotides identical or almost identical (e.g., 60%, 70%, 80%, 90%, 92%, 95%, 98% or 99% identical) to the reference nucleic acid or nucleotide sequence. Such a nucleic acid fragment according to the invention may be, where appropriate, included in a larger polynucleotide of which it is a constituent. In some embodiments, such fragments can comprise, consist essentially of, and/or consist of oligonucleotides having a length of at least about 8, 10, 12, 15, 20, 25, 30, 35, 40, 45, 50, 75, 100, 150, 200, or more consecutive nucleotides of a nucleic acid or nucleotide sequence according to the invention.

[0111] “Fully complementary” or “100% complementary” means each nucleobase of a first nucleic acid has a complementary nucleobase in a second nucleic acid. In certain embodiments, a first nucleic acid is an antisense compound and a target nucleic acid is a second nucleic acid.

[0112] “Fully modified motif” refers to an antisense compound comprising a contiguous sequence of nucleosides wherein essentially each nucleoside is a sugar modified nucleoside having uniform modification.

[0113] “Gapmer” means a chimeric antisense compound in which an internal region having a plurality of nucleosides that support RNase H cleavage is positioned between external regions having one or more nucleosides, wherein the nucleosides comprising the internal region can be chemically distinct from the nucleoside or nucleosides comprising the external regions. The internal region may be referred to as the “gap” and each of the 5′ and 3′ external regions may be referred to as a “wing.”

[0114] A “gap” is an internal segment of a chimeric antisense compound that comprises one or more linked deoxynucleosides, and is positioned between a 5′ wing (W1) and a 3′ wing (W2). A gap may be referred to as a “gap” a “gap region” or a “gap segment”.

[0115] “HBV” means mammalian hepatitis B virus, including human hepatitis B virus. The term encompasses geographical genotypes of hepatitis B virus, particularly human hepatitis B virus, as well as variant strains of geographical genotypes of hepatitis B virus.

[0116] “HBV antigen” means any hepatitis B virus antigen or protein, including core proteins such as “hepatitis B core antigen” or “HBcAG” and “hepatitis B E antigen” or “HBeAG” and envelope proteins such as “HBV surface antigen”, or “HBsAg” or “HBSAG”.

[0117] “Hepatitis B E antigen” or “HBeAg” or “HBeAG” is a secreted, non-particulate form of HBV core protein. HBV antigens HBeAg and HBcAg share primary amino acid sequences, so show cross-reactivity at the T cell level. HBeAg is not required for viral assembly or replication, although studies suggest they may be required for establishment of chronic infection. Neonatal infection with HBeAg-negative mutant often results in fulminant acute rather than chronic HBV infection (Terezawa et al (1991) Pediatr. Res. 29:5), whereas infection of young woodchucks with WHeAg-negative mutant results in a much lower rate of chronic WHV infection (Cote et al (2000) Hepatology 31:190). HBeAg may possibly function as a toleragen by inactivating core specific T cells through deletion or clonal anergy (Milich et al (1998) J. Immunol. 160:8102). There is a positive correlation between reduction of HBV viral load and antigens, and a decrease of expression, by T cells, of the inhibitory receptor programmed death-1 (PD-1; also known as PDCD1), a negative regulator of activated T cells, upon antiviral therapy and HBeAg seroconversion (Evans et al (2008) Hepatology 48:759).

[0118] “HBV mRNA” means any messenger RNA expressed by hepatitis B virus.

[0119] “HBV nucleic acid” or ‘HBV DNA” means any nucleic acid encoding HBV. For example, in certain embodiments, a HBV nucleic acid includes, without limitation, any viral DNA sequence encoding a HBV genome or portion thereof, any RNA sequence transcribed from a viral DNA including any mRNA sequence encoding a HBV protein.

[0120] “HBV protein” means any protein secreted by hepatitis B virus The term encompasses various HBV antigens, including core proteins such as “Hepatitis E antigen”, “HBeAg” or “HBeAG” and envelope proteins such as “HBV surface antigen”, or “HBsAg”.

[0121] “HBV surface antigen”, or “HBsAg”, or “HBSAG” is the envelope protein of infectious HBV viral particles but is also secreted as a non-infectious particle with serum levels 1000-fold higher than HBV viral particles. The serum levels of HBsAg in an infected person or animal can be as high as 1000 gg/mL (Kann and Gehrlich (1998) Topley & Wilson's Microbiology and Microbial Infections, 9th ed. 745). In acute HBV infections, the half-life of HBsAg in the serum, or serum tex, is 8.3 days (Chulanov et al (2003) J. Med. Virol. 69:313). Internalization of HBsAg by myeloid dendritic cells inhibits up-regulation of co-stimulatory molecules (i.e. B7) and inhibits T cell stimulatory capacity (den Brouw et al (2008) Immunology 126:280), and dendritic cells from chronically infected patients also show deficits in expression of co-stimulatory molecules, secretion of IL-12, and stimulation of T cells in the presence of HBsAg (Zheng et al (2004) J. Viral Hepatitis 11:217). HBsAg specific CD8 cells from CHB patients show altered tetramer binding. These CD8 cells are not anergic but may have TCR topology that confers partial tolerance or ignorance (Reignat et al (2002) J. Exp. Med. 195:1089). Moreover, reduction in serum HBsAg>1 log at week 24 has a high predictive value (92%) for sustained virological response (SVR-defined as nondetectable HBV DNA by PCR at 1 year after treatment) during Peg-IFNa2a therapy (Moucari et al (2009) Hepatology 49:1151).

[0122] “Hepatitis B-related condition” or “HBV-related condition” means any disease, biological condition, medical condition, or event which is exacerbated, caused by, related to, associated with, or traceable to a hepatitis B infection, exposure, or illness. The term hepatitis B-related condition includes chronic HBV infection, inflammation, fibrosis, cirrhosis, liver cancer, serum hepatitis, jaundice, liver cancer, liver inflammation, liver fibrosis, liver cirrhosis, liver failure, diffuse hepatocellular inflammatory disease, hemophagocytic syndrome, serum hepatitis, HBV viremia, liver disease related to transplantation, and conditions having symptoms which may include any or all of the following: flu-like illness, weakness, aches, headache, fever, loss of appetite, diarrhea, nausea and vomiting, pain over the liver area of the body, clay- or grey-colored stool, itching all over, and dark-colored urine, when coupled with a positive test for presence of a hepatitis B virus, a hepatitis B viral antigen, or a positive test for the presence of an antibody specific for a hepatitis B viral antigen.

[0123] “Hybridization” means the annealing of complementary nucleic acid molecules. In certain embodiments, complementary nucleic acid molecules include, but are not limited to, an antisense compound and a nucleic acid target. In certain embodiments, complementary nucleic acid molecules include, but are not limited to, an antisense oligonucleotide and a nucleic acid target.

[0124] As used herein, the term “IC50” or “IC₅₀ value” refers to the concentration of an agent where cell viability is reduced by half. The IC₅₀ is thus a measure of the effectiveness of an agent in inhibiting a biological process.

[0125] “Identifying an animal having an HBV infection” means identifying an animal having been diagnosed with an HBV; or, identifying an animal having any symptom of an HBV infection including, but not limited to chronic HBV infection, inflammation, fibrosis, cirrhosis, liver cancer, serum hepatitis, jaundice, liver cancer, liver inflammation, liver fibrosis, liver cirrhosis, liver failure, diffuse hepatocellular inflammatory disease, hemophagocytic syndrome, serum hepatitis, HBV viremia, liver disease related to transplantation, and conditions having symptoms which may include any or all of the following: flu-like illness, weakness, aches, headache, fever, loss of appetite, diarrhea, nausea and vomiting, pain over the liver area of the body, clay- or grey-colored stool, itching all over, and dark-colored urine, when coupled with a positive test for presence of a hepatitis B virus, a hepatitis B viral antigen, or a positive test for the presence of an antibody specific for a hepatitis B viral antigen, when coupled with a positive test for presence of a hepatitis B virus, a hepatitis B viral antigen, or a positive test for the presence of an antibody specific for a hepatitis B viral antigen.

[0126] “Immediately adjacent” means there are no intervening elements between the immediately adjacent elements.

[0127] “Individual” means a human or non-human animal selected for treatment or therapy.

[0128] “Individual compliance” means adherence to a recommended or prescribed therapy by an individual.

[0129] “Induce”, “inhibit”, “potentiate”, “elevate”, “increase”, “decrease” or the like, generally denote quantitative differences between two states. Such terms may refer to a statistically significant difference between the two states. For example, “an amount effective to inhibit the activity or expression of HBV” means that the level of activity or expression of HBV in a treated sample will quantitatively differ, and may be statistically significant, from the level of HBV activity or expression in untreated cells. Such terms are applied to, for example, levels of expression, and levels of activity. The term “inhibit” or “reduce” or grammatical variations thereof, as used herein, refer to a decrease or diminishment in the specified level or activity of at least about 5%, about 10%, about 15%, about 25%, about 35%, about 40%, about 50%, about 60%, about 75%, about 80%, about 90%, about 95% or more. In some embodiments, the inhibition or reduction results in little or essentially no detectible activity (at most, an insignificant amount, e.g., less than about 10% or even 5%).

[0130] “Inhibiting HBV” means reducing the level or expression of an HBV mRNA, DNA and/or protein. In certain embodiments, HBV is inhibited in the presence of an antisense compound targeting HBV, including an antisense oligonucleotide targeting HBV, as compared to expression of HBV mRNA, DNA and/or protein levels in the absence of a HBV antisense compound, such as an antisense oligonucleotide.

[0131] “Inhibiting the expression or activity” refers to a reduction, blockade of the expression or activity and does not necessarily indicate a total elimination of expression or activity.

[0132] “Injection site reaction” means inflammation or abnormal redness of skin at a site of injection in an individual.

[0133] “Internucleoside linkage” refers to the chemical bond between nucleosides.

[0134] “Intraperitoneal administration” means administration through infusion or injection into the peritoneum.

[0135] “Intravenous administration” means administration into a vein.

[0136] “Lengthened” antisense oligonucleotides are those that have one or more additional nucleosides relative to an antisense oligonucleotide disclosed herein.

[0137] “Linked deoxynucleoside” means a deoxyribonucleic acid base (A, G, C, T, U) linked by a phosphate ester to form a nucleotide.

[0138] “Linked nucleosides” means adjacent nucleosides linked together by an internucleoside linkage. An example of linked nucleoside is a linked nucleotide in which the linkage involves a phosphate group atom, e.g. a phosphodiester bond.

[0139] “Locked nucleic acid” or “LNA” or “LNA nucleosides” means nucleic acid monomers having a bridge connecting two carbon atoms between the 4′ and 2′ position of the nucleoside sugar unit, thereby forming a bicyclic sugar. Examples of such bicyclic sugar include, but are not limited to A) α-L-Methyleneoxy (4′-CH₂—O-2′) LNA; (B) β-D-Methyleneoxy (4′-CH₂—O-2′)-

[chemical structure]

LNA; (C) Ethyleneoxy (4′-(CH₂)₂—O-2′) LNA; (D) Aminooxy (4′-CH₂—O—N(R)-2′) LNA; and (E) Oxyamino (4′-CH₂—N(R)—O-2′) LNA; as depicted below.

[0140] As used herein, LNA compounds include, but are not limited to, compounds having at least one bridge between the 4′ and the 2′ position of the sugar wherein each of the bridges independently comprises 1 or from 2 to 4 linked groups independently selected from —[C(R¹) (R²)]ₙ—, —C(R¹)═C(R²)—, —C(R¹)═N—, —C(═NR¹)—, —C(═O)—, —C(═S)—, —O—, —Si(R¹)₂—, —S(═O)ₓ— and —N(R¹)—; wherein: x is 0, 1, or 2; n is 1, 2, 3, or 4; each R¹ and R² is, independently, H, a protecting group, hydroxyl, C₁-C₁₂ alkyl, substituted C₁-C₁₂ alkyl, C₂-C₁₂ alkenyl, substituted C₂-C₁₂ alkenyl, C₂-C₁₂ alkynyl, substituted C₂-C₁₂ alkynyl, C₅-C₂₀ aryl, substituted C₅-C₂₀ aryl, a heterocycle radical, a substituted heterocycle radical, heteroaryl, substituted heteroaryl, C₅-C₇ alicyclic radical, substituted C₅-C₇ alicyclic radical, halogen, OJ¹, NJ¹J², SJ¹, N₃, COOJ¹, acyl (C(═O)—H), substituted acyl, CN, sulfonyl (S(═O)₂-J¹), or sulfoxyl (S(═O)-J¹); and each J¹ and J² is, independently, H, C₁-C₁₂ alkyl, substituted C₁-C₁₂ alkyl, C₂-C₁₂ alkenyl, substituted C₂-C₁₂ alkenyl, C₂-C₁₂ alkynyl, substituted C₂-C₁₂ alkynyl, C₅-C₂₀ aryl, substituted C₅-C₂₀ aryl, acyl (C(═O)—H), substituted acyl, a heterocycle radical, a substituted heterocycle radical, C₁-C₁₂ aminoalkyl, substituted C₁-C₁₂ aminoalkyl or a protecting group.

[0141] Examples of 4′-2′ bridging groups encompassed within the definition of LNA include, but are not limited to one of formulae: —[C(R¹) (R²)]ₙ—, —[C(R¹)(R²)]ₙ—O—, —C(R¹) (R²)—N(R¹)—O— or —C(R¹)(R²)—O—N(R¹)—. Furthermore, other bridging groups encompassed with the definition of LNA are 4′-CH₂-2′, 4′—(CH₂)₂-2′, 4′—(CH₂)₃-2′, 4′—CH₂—O-2′, 4′—(CH₂)₂—O-2′, 4′—CH₂—O—N(R¹)-2′ and 4′-CH₂—N(R¹)—O-2′-bridges, wherein each R¹ and R² is, independently, H, a protecting group or C₁-C₁₂ alkyl.

[0142] Also included within the definition of LNA according to the invention are LNAs in which the 2′-hydroxyl group of the ribosyl sugar ring is connected to the 4′ carbon atom of the sugar ring, thereby forming a methyleneoxy (4′-CH₂—O-2′) bridge to form the bicyclic sugar moiety. The bridge can also be a methylene (—CH₂—) group connecting the 2′ oxygen atom and the 4′ carbon atom, for which the term methyleneoxy (4′-CH₂—O-2′) LNA is used. Furthermore, in the case of the bicyclic sugar moiety having an ethylene bridging group in this position, the term ethyleneoxy (4′-CH₂CH₂—O-2′) LNA is used. α-L-methyleneoxy (4′-CH₂—O-2′), an isomer of methyleneoxy (4′-CH₂—O-2′) LNA is also encompassed within the definition of LNA, as used herein.

[0143] A “maximum blood plasma concentration” or “Cₘₐₓ” refers to the highest concentration of a drug in the blood plasma after dose of the drug is given to a subject. Methods of measuring the concentration of drugs will be known to persons of ordinary skill in the art, and include, inter alia, liquid chromatography, and tandem mass spectrometry.

[0144] “Mismatch” or “non-complementary nucleobase” refers to the case when a nucleobase of a first nucleic acid is not capable of pairing with the corresponding nucleobase of a second or target nucleic acid.

[0145] “Modified internucleoside linkage” refers to a substitution or any change from a naturally occurring internucleoside bond (i.e. a phosphodiester internucleoside bond).

[0146] “Modified nucleobase” means any nucleobase other than adenine, cytosine, guanine, thymidine, or uracil. An “unmodified nucleobase” means the purine bases adenine (A) and guanine (G), and the pyrimidine bases thymine (T), cytosine (C) and uracil (U).

[0147] “Modified nucleoside” means a nucleoside having, independently, a modified sugar moiety and/or modified nucleobase.

[0148] “Modified nucleotide” means a nucleotide having, independently, a modified sugar moiety, modified internucleoside linkage, or modified nucleobase.

[0149] “Modified oligonucleotide” means an oligonucleotide comprising at least one modified internucleoside linkage, a modified sugar, and/or a modified nucleobase.

[0150] “Modified sugar” means substitution and/or any change from a natural sugar moiety.

[0151] “Monomer” refers to a single unit of an oligomer. Monomers include, but are not limited to, nucleosides and nucleotides, whether naturally occurring or modified.

[0152] “Motif” means the pattern of unmodified and modified nucleosides in an antisense compound. “Natural sugar moiety” means a sugar moiety found in DNA (2′-H) or RNA (2′-OH). “Naturally occurring internucleoside linkage” means a 3′ to 5′ phosphodiester linkage.

[0153] “Non-complementary nucleobase” refers to a pair of nucleobases that do not form hydrogen bonds with one another or otherwise support hybridization.

[0154] “Nucleic acid” refers to molecules composed of monomeric nucleotides. A nucleic acid includes, but is not limited to, ribonucleic acids (RNA), deoxyribonucleic acids (DNA), single-stranded nucleic acids, double-stranded nucleic acids, small interfering ribonucleic acids (siRNA), and microRNAs (miRNA).

[0155] “Nucleobase” means a heterocyclic moiety capable of pairing with a base of another nucleic acid.

[0156] “Nucleobase complementarity” refers to a nucleobase that is capable of base pairing with another nucleobase. For example, in DNA, adenine (A) is complementary to thymine (T). For example, in RNA, adenine (A) is complementary to uracil (U). In certain embodiments, complementary nucleobase refers to a nucleobase of an antisense compound that is capable of base pairing with a nucleobase of its target nucleic acid. For example, if a nucleobase at a certain position of an antisense compound is capable of hydrogen bonding with a nucleobase at a certain position of a target nucleic acid, then the position of hydrogen bonding between the oligonucleotide and the target nucleic acid is considered to be complementary at that nucleobase pair.

[0157] “Nucleobase sequence” means the order of contiguous nucleobases independent of any sugar, linkage, and/or nucleobase modification.

[0158] “Nucleoside” means a nucleobase linked to a sugar. A nucleoside includes deoxynucleosides, e.g. deoxyribonucleosides.

[0159] “Nucleoside mimetic” includes those structures used to replace the sugar or the sugar and the base and not necessarily the linkage at one or more positions of an oligomeric compound such as for example nucleoside mimetics having morpholino, cyclohexenyl, cyclohexyl, tetrahydropyranyl, bicyclo or tricyclo sugar mimetics, e.g., non furanose sugar units. Nucleotide mimetic includes those structures used to replace the nucleoside and the linkage at one or more positions of an oligomeric compound such as for example peptide nucleic acids or morpholinos (morpholinos linked by —N(H)—C(═O)—O— or other non-phosphodiester linkage). Sugar surrogate overlaps with the slightly broader term nucleoside mimetic but is intended to indicate replacement of the sugar unit (furanose ring) only. The tetrahydropyranyl rings provided herein are illustrative of an example of a sugar surrogate wherein the furanose sugar group has been replaced with a tetrahydropyranyl ring system. “Mimetic” refers to groups that are substituted for a sugar, a nucleobase, and/or internucleoside linkage. Generally, a mimetic is used in place of the sugar or sugar-internucleoside linkage combination, and the nucleobase is maintained for hybridization to a selected target.

[0160] “Nucleotide” means a nucleoside having a phosphate group covalently linked to the sugar portion of the nucleoside.

[0161] “Off-target effect” refers to an unwanted or deleterious biological effect associated with modulation of RNA or protein expression of a gene other than the intended target nucleic acid.

[0162] “Oligomeric compound” means a polymer of linked monomeric subunits which is capable of hybridizing to at least a region of a nucleic acid molecule.

[0163] “Oligonucleoside” means an oligonucleotide in which the internucleoside linkages do not contain a phosphorus atom.

[0164] “Oligonucleotide” means a polymer of linked nucleosides each of which can be modified or unmodified, independent one from another.

[0165] “Parenteral administration” means administration through injection (e.g., bolus injection) or infusion. Parenteral administration includes subcutaneous administration, intravenous administration, intramuscular administration, intraarterial administration, intraperitoneal administration, or intracranial administration, e.g., intrathecal or intracerebroventricular administration.

[0166] “Peptide” means a molecule formed by linking at least two amino acids by amide bonds. Without limitation, as used herein, “peptide” refers to polypeptides and proteins.

[0167] “Pharmaceutically acceptable carrier” means a medium or diluent that does not interfere with the structure of the oligonucleotide. Certain such carriers enable pharmaceutical compositions to be formulated as, for example, tablets, pills, dragees, capsules, liquids, gels, syrups, slurries, suspension and lozenges for the oral ingestion by a subject.

[0168] “Pharmaceutically acceptable derivative” encompasses pharmaceutically acceptable salts, conjugates, prodrugs or isomers of the compounds described herein.

[0169] “Pharmaceutically acceptable salts” means physiologically and pharmaceutically acceptable salts of antisense compounds, i.e., salts that retain the desired biological activity of the parent oligonucleotide and do not impart undesired toxicological effects thereto.

[0170] “Pharmaceutical agent” means a substance that provides a therapeutic benefit when administered to an individual. For example, in certain embodiments, an antisense oligonucleotide targeted to HBV is a pharmaceutical agent.

[0171] “Pharmaceutical composition” means a mixture of substances suitable for administering to a subject. For example, a pharmaceutical composition may comprise an antisense oligonucleotide and a sterile aqueous solution. In certain embodiments, a pharmaceutical composition shows activity in free uptake assay in certain cell lines.

[0172] “Phosphorothioate linkage” means a linkage between nucleosides where the phosphodiester bond is modified by replacing one of the non-bridging oxygen atoms with a sulfur atom. A phosphorothioate linkage is a modified internucleoside linkage.

[0173] “Portion” means a defined number of contiguous (i.e., linked) nucleobases of a nucleic acid. In certain embodiments, a portion is a defined number of contiguous nucleobases of a target nucleic acid. In certain embodiments, a portion is a defined number of contiguous nucleobases of an antisense compound.

[0174] “Prevention” or “preventing” refers to delaying or forestalling the onset or development of a condition or disease for a period of time from hours to days, preferably weeks to months.

[0175] “Prodrug” means a therapeutic agent that is prepared in an inactive form that is converted to an active form (i.e., drug) within the body or cells thereof by the action of endogenous enzymes or other chemicals and/or conditions.

[0176] “Prophylactically effective amount” refers to an amount of a pharmaceutical agent that provides a prophylactic or preventative benefit to an animal.

[0177] “Recommended therapy” means a therapeutic regimen recommended by a medical professional for the treatment, amelioration, or prevention of a disease.

[0178] “Region” is defined as a portion of the target nucleic acid having at least one identifiable structure, function, or characteristic.

[0179] “Ribonucleotide” means a nucleotide having a hydroxy at the 2′ position of the sugar portion of the nucleotide. Ribonucleotides may be modified with any of a variety of substituents.

[0180] “Salts” mean a physiologically and pharmaceutically acceptable salts of antisense compounds, i.e., salts that retain the desired biological activity of the parent oligonucleotide and do not impart undesired toxicological effects thereto.

[0181] “Segments” are defined as smaller or sub-portions of regions within a target nucleic acid.

[0182] A “separator” is a segment or region that separates two gap regions and is positioned in between two gap regions in a chimeric antisense compound. The separator segment may have one or more nucleosides, wherein the nucleosides are chemically distinct from the nucleosides comprising the gap. A separator segment comprises nucleosides modified to impart properties such as enhanced inhibitory activity, increased binding affinity for a target nucleic acid, lowered in vivo toxicity or resistance to degradation by in vivo nucleases. A chimeric antisense compound may comprise one or more separator segments. A separator may be referred to as a “separator” a “separator region” or a “separator segment”. Exemplary chimeric antisense compounds of the disclosure comprise one, two, three, four, five or six separator segments.

[0183] “Seroconversion” is defined as serum HBeAg absence plus serum HBeAb presence, if monitoring HBeAg as the determinant for seroconversion, or defined as serum HBsAg absence, if monitoring HBsAg as the determinant for seroconversion, as determined by currently available detection limits of commercial ELISA systems.

[0184] “Shortened” or “truncated” versions of antisense oligonucleotides taught herein have one, two or more nucleosides deleted.

[0185] “Side effects” means physiological responses attributable to a treatment other than desired effects. In certain embodiments, side effects include, without limitation, injection site reactions, liver function test abnormalities, renal function abnormalities, liver toxicity, renal toxicity, central nervous system abnormalities, and myopathies. For example, increased aminotransferase levels in serum may indicate liver toxicity or liver function abnormality. For example, increased bilirubin may indicate liver toxicity or liver function abnormality.

[0186] “Significant,” as used herein means measurable or observable, e.g, a significant result, such as, a significant improvement or significant reduction generally refers to a measurable or observable result, such as a measurable or observable improvement or reduction.

[0187] “Sites,” as used herein, are defined as unique nucleobase positions within a target nucleic acid.

[0188] “Slows progression” means decrease in the development of the said disease.

[0189] “Specifically hybridizable” refers to an antisense compound having a sufficient degree of complementarity between an antisense oligonucleotide and a target nucleic acid to induce a desired effect, while exhibiting minimal or no effects on non-target nucleic acids under conditions in which specific binding is desired, i.e., under physiological conditions in the case of in vivo assays and therapeutic treatments. “Stringent hybridization conditions” or “stringent conditions” refer to conditions under which an oligomeric compound will hybridize to its target sequence, but to a minimal number of other sequences.

[0190] “Statistically Significant,” as used herein means a measurable or observable parameter that is unlikely to occur by chance.

[0191] “Subcutaneous administration” means administration just below the skin. “Subject” means a human or non-human animal selected for treatment or therapy.

[0192] “Target” refers to a protein, the modulation of which is desired.

[0193] “Target gene” refers to a gene encoding a target.

[0194] “Targeting” means the process of design and selection of an antisense compound that will specifically hybridize to a target nucleic acid and induce a desired effect.

[0195] “Target nucleic acid,” “target RNA,” “target RNA transcript” and “nucleic acid target” all mean a nucleic acid capable of being targeted by antisense compounds.

[0196] “Target region” means a portion of a target nucleic acid to which one or more antisense compounds is targeted.

[0197] “Target segment” means the sequence of nucleotides of a target nucleic acid to which an antisense compound is targeted. “5′ target site” refers to the 5′-most nucleotide of a target segment. “3′ target site” refers to the 3′-most nucleotide of a target segment.

[0198] “Therapeutically effective amount” means an amount of a pharmaceutical agent that provides a therapeutic benefit to an individual.

[0199] “Treatment” refers to administering a composition to effect an alteration or improvement of the disease or condition.

[0200] “Unmodified” nucleobases mean the purine bases adenine (A) and guanine (G), and the pyrimidine bases thymine (T), cytosine (C) and uracil (U).

[0201] “Unmodified nucleotide” means a nucleotide composed of naturally occurring nucleobases, sugar moieties, and internucleoside linkages. In certain embodiments, an unmodified nucleotide is an RNA nucleotide (i.e. (3-D-ribonucleosides) or a DNA nucleotide (i.e. (3-D-deoxyribonucleoside).

[0202] “Validated target segment” is defined as at least an 8-nucleobase portion (i.e. 8 consecutive nucleobases) of a target region to which an active oligomeric compound is targeted.

[0203] A “wing” is a terminal segment of a chimeric antisense oligonucleotide, modified to impart to an oligonucleotide, properties such as enhanced inhibitory activity, increased binding affinity for a target nucleic acid, lowered in vivo toxicity or resistance to degradation by in vivo nucleases. A wing may be referred to as a “wing” a “wing region” or a “wing segment”. As used herein, a wing comprises at least two linked nucleosides; a subset of which may comprise one or more deoxynucleosides, but the entire wing cannot be made up of only deoxynucleosides.

[0204] The chimeric antisense compounds of the disclosure comprise a 5′ wing segment (W1) located at the 5′ terminus of the chimeric antisense oligonucleotide and the residue at the 3′ end of the W1 cannot be a deoxynucleoside. The chimeric antisense compounds of the disclosure also comprise a 3′ wing segment (W2) located at the 3′ terminus of the chimeric antisense oligonucleotide and the 5′ terminal residue of the W2 cannot be a deoxynucleoside.

[0205] A 5′ wing (W1) begins at the 5′ terminus of the chimeric antisense oligonucleotide, extends in the 5′ to 3′ direction, and ends at the first nucleoside that is not a deoxynucleoside, that is directly linked to a deoxynucleoside of a first gap, thus indicating the 3′ end of the W1 and the 5′ end of a first gap (G1).

[0206] A 3′ wing (W2) begins at the 3′ terminus of the chimeric antisense oligonucleotide, extends in the 3′ to 5′ direction, and ends at the first nucleoside that is not a deoxynucleoside, that is directly linked to a deoxynucleoside of a gap, thus indicating the 3′ end of the last gap of and the 5′ end of the W2.

### Exemplary Chimeric Antisense Oligonucleotides

[0207] The disclosure provides for at least the following exemplary chimeric antisense oligonucleotides.

[0208] In one aspect, provide is an oligonucleotide that is modified, the modified oligonucleotide comprising from 5′ to 3′:

5′ W1-G1-S1-G2-W2 3′ (Formula I)
[0209] wherein:
[0210] W1 is a 5′ wing segment;
[0211] W2 is a 3′ wing segment;
[0212] G1 is a first gap segment;
[0213] S1 is a first separator segment;
[0214] G2 is a second gap segment;
[0215] - is an internucleoside linkage; and
[0216] at least one nucleoside of the oligonucleotide is modified.

[0217] In some embodiments, the modified oligonucleotide comprises from 5′ to 3′:

5′ W1-G1-S1-G2-S2-G3-W2 3′ (Formula II)
[0218] wherein:
[0219] S2 is a second separator segment; and
[0220] G3 is a third gap segment.

[0221] In some embodiments, the modified oligonucleotide comprises from 5′ to 3′:

5′ W1-G1-S1-G2-S2-G3-S3-G4-W2 3′ (Formula III)
[0222] wherein:
[0223] S3 is a third separator segment; and
[0224] G4 is a fourth gap segment.

[0225] In some embodiments, the modified oligonucleotide comprises from 5′ to 3′:

5′ W1-G1-S1-G2-S2-G3-S3-G4-S4-G5-W2 3′ (Formula IV)
[0226] wherein:
[0227] S4 is a fourth separator segment; and
[0228] G5 is a fifth gap segment.

[0229] In some embodiments, the modified oligonucleotide comprises from 5′ to 3′:

5′ W1-G1-S1-G2-S2-G3-S3-G4-S4-G5-S5-G6-W2 3′ (Formula V)
[0230] wherein:
[0231] S5 is a fifth separator segment; and
[0232] G6 is a sixth gap segment.

[0233] In some embodiments, the modified oligonucleotide comprises from 5′ to 3′:

5′ W1-G1-S1-G2-S2-G3-S3-G4-S4-G5-S5-G6-S6-G7-W2 3′ (Formula VI)
[0234] wherein:
[0235] S6 is a sixth separator segment; and
[0236] G7 is a seventh gap segment.

[0237] In some embodiments, W1 comprises 2 to 25 linked nucleosides. In some embodiments, W1 comprises one or more linked deoxynucleosides.

[0238] In some embodiments, W2 comprises 2 to 35 linked nucleosides. In some embodiments, W2 comprises one or more linked deoxynucleosides.

[0239] In some embodiments, any one or more of G1, G2, G3, G4, G5, G6, and/or G7 comprises 1 to 10 linked deoxynucleosides.

[0240] In some embodiments, any one or more of S1, S2, S3, S4, S5, and/or S6 comprise 1, 2, 3, 4, or 5 linked nucleosides.

[0241] In some embodiments, the modified oligonucleotide is 18-50 nucleobases in length. In some embodiments, the modified oligonucleotide is at least 20 nucleobases in length. In some embodiments, the modified oligonucleotide is 20 nucleobases in length.

[0242] In some embodiments, the modified oligonucleotide is of Formula I, and W1 comprises 4-6 linked nucleosides, G1 comprises 1-6 linked deoxynucleosides, S1 comprises 1 linked nucleoside, G2 comprises 1-6 linked deoxynucleosides, and W2 comprises 4-6 linked nucleosides.

[0243] In some embodiments, the modified oligonucleotide is of Formula I, and W1 comprises 4-6 linked nucleosides, G1 comprises 5 linked deoxynucleosides, S1 comprises 1 linked nucleoside, G2 comprises 5 linked deoxynucleosides, and W2 comprises 4-6 linked nucleosides.

[0244] In some embodiments, the modified oligonucleotide is of Formula I, and W1 comprises 4 linked nucleosides, G1 comprises 5 linked deoxynucleosides, S1 comprises 1 linked nucleoside, G2 comprises 5 linked deoxynucleosides, and W2 comprises 5 linked nucleosides.

[0245] In some embodiments, the modified oligonucleotide is of Formula I, and the length of the G1-S1-G2 is between 8 and 12 nucleobases in length.

[0246] The following embodiments pertain to any of Formula I-VI: In some embodiments, G1, G2, G3, G4, G5, G6, and G7 can comprise a nucleoside comprising a modification to a 2′-deoxynucleoside. In some embodiments, any one or more of G1, G2, G3, G4, G5, G6, and G7 comprises a nucleoside comprising a 2′-deoxy 5-methylcytidine sugar modification. In some embodiments, S1, S2, S3, S4, S5, and/or S6 comprises a nucleoside comprising a 2′-O-methoxyethyl sugar modification. In some embodiments, S1, S2, S3, S4, S5, and/or S6 comprises a nucleoside comprising a 5-methylcytidine. In some embodiments, S1, S2, S3, S4, S5, and/or S6 comprises a nucleoside comprising a 2′-O-methyl sugar modification. In some embodiments, S1, S2, S3, S4, S5, and/or S6 comprises a nucleoside comprising a 2′-OH sugar modification. In some embodiments, S1, S2, S3, S4, S5, and/or S6 comprises a nucleoside comprising a 2′-fluoro sugar modification. In some embodiments, S1, S2, S3, S4, S5, and/or S6 comprises a nucleoside comprising a 2′-fluoro-arabinonucleic acid (2′-fluoro-ANA) sugar modification. In some embodiments, S1, S2, S3, S4, S5, and/or S6 comprises a glycol nucleic acid (GNA). In some embodiments, S1, S2, S3, S4, S5, and/or S6 comprises a LNA. In some embodiments, W1 comprises a nucleoside comprising a 2′-deoxy sugar modification (e.g, wherein the 2′-deoxy sugar modification is at positions 2 and/or 5 of a sequence corresponding to SEQ ID NO: 2.). In some embodiments, W1 comprises a nucleoside comprising a 2′-O-methoxyethyl sugar modification (e.g wherein the 2′-O-methoxyethyl sugar modification is at position 1, 2, 3, 4 and/or 5 of a sequence corresponding to SEQ ID NO: 2). In some embodiments, W1 comprises a 2′-O-methoxyethyl 5-methylcytidine at position 2 of a sequence corresponding to SEQ ID NO: 2. In some embodiments, W1 comprises a nucleoside comprising a 2′-O-methyl sugar modification (e.g, wherein the 2′-O-methyl sugar modification is at positions 1, 2, 3, 4 and/or 5 of a sequence corresponding to SEQ ID NO: 2). In some embodiments, W1 comprises a 2′-O-methyl 5-methylcytidine at position 2 of a sequence corresponding to SEQ ID NO: 2. In some embodiments, W1 comprises a nucleoside comprising a 2′-fluoro sugar modification. In some embodiments, W1 comprises a nucleoside comprising a 2′-fluoro-arabinonucleic acid (2′-fluoro-ANA) modification. In some embodiments, W1 comprises a glycol nucleic acid (GNA) (e.g, wherein the GNA is at position 2 of a sequence corresponding to SEQ ID NO: 2.) In some embodiments, W1 comprises a modified nucleoside and wherein the modified nucleoside is a locked nucleic acid (LNA) (e.g, wherein the LNA is at positions 1 and/or 3 of a sequence corresponding to SEQ ID NO: 2). In some embodiments, W2 comprises a nucleoside comprising a 2′-deoxy sugar modification (e.g, wherein the 2′-deoxy sugar modification is at positions 15 and/or 16 of a sequence corresponding to SEQ ID NO: 2). In some embodiments, W2 comprises a nucleoside comprising a 2′-O-methoxyethyl sugar modification (e.g, wherein the 2′-O-methoxyethyl sugar modification is at positions 15, 16, 17, 18, 19 and/or 20 of a sequence corresponding to SEQ ID NO: 2). In some embodiments, W2 comprises a nucleoside comprising a 2′-O-methyl sugar modification (e.g, wherein the 2′-O-methyl sugar modification is at positions 15, 16, 17, 18, 19 and/or 20 of a sequence corresponding to SEQ ID NO: 2. In some embodiments, W2 comprises a nucleoside comprising a 2′-fluoro sugar modification. In some embodiments, W2 comprises a nucleoside comprising a 2′-fluoro-arabinonucleic acid (2′-fluoro-ANA) modification. In some embodiments, W2 comprises a modified nucleoside and wherein the modified nucleoside is a glycol nucleic acid (GNA). In some embodiments, W2 comprises a modified nucleoside and wherein the modified nucleoside is a locked nucleic acid (LNA) (e.g, wherein the LNA is at positions 16, 17, 18, 19 and/or 20 of a sequence corresponding to SEQ ID NO: 2.)

### Exemplary Target Sequences and Exemplary Modified Oligonucleotides

[0247] Certain embodiments provide methods, compounds, and compositions for inhibiting HBV mRNA expression.

[0248] Certain embodiments provide antisense compounds targeted to a HBV nucleic acid sequence. Exemplary HBV nucleic acid sequences include but are not limited to those shown in Table 1.

TABLE 1
Exemplary HBV sequences

| HBV Genotype | Accession No. | SEQ ID NO: |
|---|---|---|
| GTD (HepG2.2.15 cells) | U95551.1 | SEQ ID NO: 3 |
| GTA | AJ309369.1 | SEQ ID NO: 667 |
| GTB | D00330.1 | SEQ ID NO: 668 |
| GTC | AB033550.1 | SEQ ID NO: 669 |
| GTD | KX470733.1 | SEQ ID NO: 670 |
| GTE | KX186584 | SEQ ID NO: 671 |
| GTF | KP718112 | SEQ ID NO: 672 |
| GTG | KX264500 | SEQ ID NO: 673 |
| GTH | KX264501 | SEQ ID NO: 674 |

[0249] In certain embodiments, the HBV nucleic acid is the sequence set forth in GENBANK Accession No. U95551.1 (incorporated herein as SEQ ID NO: 3). In some embodiments, the antisense compounds target a sequence recited in SEQ ID NO: 3 or a portion thereof. In some embodiments, the antisense compounds target a sequence at positions 1583-1602 of SEQ ID NO: 3.

[0250] Exemplary HBV nucleic acid target sequences include but are not limited to those shown in Table 2.

TABLE 2
Exemplary HBV Target Sequences

| HBV Target Sequence | SEQ ID NO: |
|---|---|
| CTTGG TCATG GGCCA TCAG | 1 |
| GCACT TCGCT TCACC TCTGC | 4 |
| TTTGTTTACGTCCCGTCGGC | 675 |
| TTTACGTCCCGTCGGCGCTGAATCCTGCGG | 676 |
| TTTACGTCCCGTCGGCGCTG | 677 |
| TTTACGCGGACTCCCCGTCT | 678 |
| TTGTTTACGTCCCGTCGGCG | 679 |
| TTGTTGACAAGAATCCTCAC | 680 |
| TTGAGAGAAGTCCACCACG | 681 |
| TTCTCCTGGCTCAGTTTACTAGTGCCATTT | 682 |
| TTCTCCTGGCTCAGTTTACT | 683 |
| TTACGTCCCGTCGGCGCTGA | 684 |
| TGTTTACGTCCCGTCGGCGC | 685 |
| TGTGCCTTCTCATCTGCCGG | 686 |
| TGTGCACTTCGCTTCACCTC | 687 |
| TGGTGGACTTCTCTCAATTT | 688 |
| TGGCTCAGTTTACTAGTGCC | 689 |
| TGGACTTCTCTCAATTTTCTAGGGG | 690 |
| TGGACTTCTCTCAATTTTCT | 691 |
| TGCCTTCTCATCTGCCGGAC | 692 |
| TGCCGGACCGTGTGCACTTC | 693 |
| TGCCGATCCATACTGCGGAA | 694 |
| TGCACTTCGCTTCACCTCTG | 695 |
| TGACAAGAATCCTCACAATA | 696 |
| TCTTTACGCGGACTCCCCGT | 697 |
| TCTTGTTGACAAGAATCCTC | 698 |
| TCTGTGCCTTCTCATCTGCC | 699 |
| TCTGCCGATCCATACTGCGG | 700 |
| TCTCTTTACGCGGACTCCCC | 701 |
| TCTCATCTGCCGGACCGTGT | 702 |
| TCGGCGCTGAATCCTGCGGA | 703 |
| TCCTGGCTCAGTTTACTAGT | 704 |
| TCCTCACAATACCGCAGAGT | 705 |
| TCCCGTCGGCGCTGAATCCT | 706 |
| TCCATACTGCGGAACTCCTA | 707 |
| TCATCTGCCGGACCGTGTGC | 708 |
| TCATCTCGAACGTTCACAGTCA | 709 |
| TCAGTTTACTAGTGCCATTT | 710 |
| TATTGTGAGGATTCTTGTCA | 711 |
| TAGGAGGCTGTAGGCATAAATTGGTCTGCG | 712 |
| TACGTCCCGTCGGCGCTGAA | 713 |
| TACGCGGACTCCCCGTCTGT | 714 |
| GTTTACGTCCCGTCGGCGCT | 715 |
| GTTGGTGCACTTCGCTTCAC | 716 |
| GTTGACAAGAATCCTCACAA | 717 |
| GTTCCCAGTATGGATCGGC | 718 |
| GTGTGCACTTCGCTTCACCT | 719 |
| GTGGTGGACTTCTCTCAATT | 720 |
| GTGGACTTCTCTCAATTTTCT | 721 |
| GTGGACTTCTCTCAATTTTC | 722 |
| GTGCCTTCTCATCTGCCGGA | 723 |
| GTGCACTTCGCTTCACCTCT | 724 |
| GTGAAGCGAAGTGCACACGG | 725 |
| GTCTGTGCCTTCTCATCTGC | 726 |
| GTCGGCGCTGAATCCTGCGG | 727 |
| GTCCCGTCGGCGCTGAATCC | 728 |
| GTATTGTGAGGATTCTTGTC | 729 |
| GGTGGACTTCTCTCAATTTT | 730 |
| GGGCGCACCTCTCTTTACGC | 731 |
| GGCTGTAGGCATAAATTGGT | 732 |
| GGCGCTGAATCCTGCGGACG | 733 |
| GGAGGAACCTTCAGGGAAGG | 734 |
| GGACTCCCCGTCTGTGCCTT | 735 |
| GGACCGTGTGCACTTCGCTT | 736 |
| GCTGTAGGCATAAATTGGT | 737 |
| GCTGAATCCTGCGGACGACC | 738 |
| GCTCAGTTTACTAGTGCCAT | 739 |
| GCGGACTCCCCGTCTGTGCC | 740 |
| GCGCTGAATCCTGCGGACGA | 741 |
| GCGCACCTCTCTTTACGCGG | 742 |
| GCCTTCTCATCTGCCGGACC | 743 |
| GCCGGACCGTGTGCACTTCG | 744 |
| GCCGATCCATACTGCGGAAC | 745 |
| GCCGATCCATACTGCGGAA | 746 |
| GCACTTCGCTTCACCTCTGC | 747 |
| GCACTAGTAAACTGAGCCAG | 748 |
| GCACCTCTCTTTACGCGGAC | 749 |
| GATCCATACTGCGGAACTCC | 750 |
| GACTCCCCGTCTGTGCCTTC | 751 |
| GACCGTGTGCACTTCGCTTC | 752 |
| GACAAGAATCCTCACAATAC | 753 |
| GAATCCTCACAATACCGCAG | 754 |
| GAAAATTGAGAGAAGTCCAC | 755 |
| CTTTGTTTACGTCCCGTCGG | 756 |
| CTTGTTGACAAGAATCCTCACAATACCGCA | 757 |
| CTTCTCATCTGCCGGACCGT | 758 |
| CTGTGCCTTCTCATCTGCCG | 759 |
| CTGGCTCAGTTTACTAGTGC | 760 |
| CTGGCTCAGTTTACTAGTG | 761 |
| CTGCCGGACCGTGTGCACTT | 762 |
| CTGCCGATCCATACTGCGGA | 763 |
| CTCTGCCGATCCATACTGCG | 764 |
| CTCCTGGCTCAGTTTACTAG | 765 |
| CTCCCCGTCTGTGCCTTCTC | 766 |
| CTCACAATACCGCAGAGTCT | 767 |
| CTATCAAGGTATGTTGCCCGTTTGTCCTCT | 768 |
| CGTGTGCACTTCGCTTCACC | 769 |
| CGTGGTGGACTTCTCTCAATTTTCTAGGGG | 770 |
| CGTGGTGGACTTCTCTCAATTTTCT | 771 |
| CGTGGTGGACTTCTCTCAAT | 772 |
| CGTGGTGGACTTCTCTCAAT | 773 |
| CGTCGGCGCTGAATCCTGCG | 774 |
| CGTCCCGTCGGCGCTGAATC | 775 |
| CGGGGCGCACCTCTCTTTAC | 776 |
| CGGCGCTGAATCCTGCGGAC | 777 |
| CGGACTCCCCGTCTGTGCCT | 778 |
| CGGACCGTGTGCACTTCGCT | 779 |
| CGCTGAATCCTGCGGACGAC | 780 |
| CGCGGACTCCCCGTCTGTGC | 781 |
| CGCACCTCTCTTTACGCGGA | 782 |
| CCTTTGTTTACGTCCCGTCG | 783 |
| CCTTCTCATCTGCCGGACCG | 784 |
| CCTTAGGCACTCCTGCCTCT | 785 |
| CCTGGCTCAGTTTACTAGTG | 786 |
| CCTCTGCCGATCCATACTGCGGAACTCCTA | 787 |
| CCTCTGCCGATCCATACTGC | 788 |
| CCTCTCTTTACGCGGACTCC | 789 |
| CCTCACAATACCGCAGAGTC | 790 |
| CCGTGTGCACTTCGCTTCAC | 791 |
| CCGTGTGCACTTCGCTGTTG | 792 |
| CCGTGTGCACTTCGCT | 793 |
| CCGTCTGTGCCTTCTCATCT | 794 |
| CCGTCGGCGCTGAATCCTGC | 795 |
| CCGGTCCGTGTGCACTTCGC | 796 |
| CCGGACCGTGTGCACTTCGC | 797 |
| CCGATCCATACTGCGGAACT | 798 |
| CCCGTCGGCGCTGAATCCTG | 799 |
| CCCCGTCTGTGCCTTCTCAT | 800 |
| CAGGTCCCCTAGAAGAAGAA | 801 |
| CACGGGGCGCACCTCTCTTT | 802 |
| CACCTCTCTTTACGCGGACT | 803 |
| CAAGAATCCTCACAATACCG | 804 |
| ATCTGCCGGACCGTGTGCAC | 805 |
| ATCCTCACAATACCGCAGAG | 806 |
| AGACTCGTGGTGGACTTCTCTCAATTTTCT | 807 |
| AGAATCCTCACAATACCGCA | 808 |
| ACGTCCCGTCGGCGCTGAAT | 809 |
| ACGCGGACTCCCCGTCTGTG | 810 |
| ACCTCTCTTTACGCGGACTC | 811 |
| ACCGTGTGCACTTCGCTTCA | 812 |
| ACCAATTTATGCCTACAGCG | 813 |
| ACAAGAATCCTCACAATACC | 814 |
| AATCCTCACAATACCGCAGA | 815 |
| AAGGTATGTTGCCCGTTTGT | 816 |
| AAGAATCCTCACAATACCGC | 817 |
| CTAGACTCGTGGTGGACTTC | 819 |
| CCTGCTGCTATGCCTCATCT | 820 |
| CTGCTGCTATGCCTCATCTT | 821 |
| TGCTGCTATGCCTCATCTTC | 822 |
| GCTGCTATGCCTCATCTTCT | 823 |
| CTGCTATGCCTCATCTTCTT | 824 |
| CCTATGGGAGTGGGCCTCAG | 825 |
| GCCATTTGTTCAGTGGTTCG | 826 |
| GGAGGCTGTAGGCATAAATT | 827 |
| GAGGCTGTAGGCATAAATTG | 828 |
| AGGCTGTAGGCATAAATTGG | 829 |
| GGCTGTAGGCATAAATTGGT | 830 |
| TTCAAGCCTCCAAGCTGTGC | 831 |
| TCAAGCCTCCAAGCTGTGCC | 832 |
| CAAGCCTCCAAGCTGTGCCT | 833 |
| AAGCCTCCAAGCTGTGCCTT | 834 |
| AGCCTCCAAGCTGTGCCTTG | 835 |
| GCCTCCAAGCTGTGCCTTGG | 836 |
| GAACTCCCTCGCCTCGCAGA | 837 |
| CACCATATTCTTGGGAACA | 838 |

[0251] In some embodiments, the HBV target comprises a sequence of SEQ ID NO: 1, 4, 675-838. In some embodiments, the HBV target comprises a sequence of CTTGG TCATG GGCCA TCAG (SEQ ID NO: 1). In some embodiments, the HBV target comprises a sequence of

(SEQ ID NO: 4)
GCACT TCGCT TCACC TCTGC.

[0252] In certain embodiments, the compounds provided herein comprise a modified oligonucleotide. In certain embodiments the compounds comprise a modified oligonucleotide and a conjugate as described herein. In certain embodiments, the modified oligonucleotide is a pharmaceutically acceptable derivative.

[0253] In certain embodiments, the HBV target comprises the sequence recited in SEQ ID NO: 3 or a portion thereof or a variant thereof. In certain embodiments, the modified oligonucleotide is at least 75%, or at least 80%, or at least 85%, or at least 90%, or at least 95%, or 100% complementary to a HBV nucleic acid.

[0254] In certain embodiments, the HBV target comprises the sequence recited in SEQ ID NO: 1. In certain embodiments, the modified oligonucleotide is at least 75%, or at least 80%, or at least 85%, or at least 90%, or at least 95%, or 100% complementary to SEQ ID NO: 1.

[0255] In certain embodiments, the HBV target comprises the sequence recited in SEQ ID NO: 4. In certain embodiments, the modified oligonucleotide is at least 75%, or at least 80%, or at least 85%, or at least 90%, or at least 95%, or 100% complementary to SEQ ID NO: 4.

[0256] In some embodiments, the compounds or compositions comprise a modified oligonucleotide of 14, 15, 16, 17, 18, 19, 20, 21, 22, 23, 24, 25, 26, 27, 28, 29, 30, 31, 32, 33, 34, 35, 36, 37, 38, 39, 40, 41, 42, 43, 44, 45, 46, 47, 48, 49 or 50 linked nucleosides in length that bind to a HBV target sequence. In certain embodiments, the compounds or compositions comprise a modified oligonucleotide of 20 linked nucleosides that bind to a HBV target sequence.

[0257] In certain embodiments, the modified oligonucleotide of 20 linked nucleosides has a nucleobase sequence of GCAGA GGTGA AGCGA AGTGC (SEQ ID NO: 2). A chart showing the nucleobase positions of SEQ ID NO: 2 is shown below:

1 2 3 4 5 6 7 8 9 10 11 12 13 14 15 16 17 18 19 20
G C A G A G G T G A A G C G A A G T G C

[0258] In certain embodiments, the modified oligonucleotide of 20 linked nucleosides has a nucleobase sequence of GTGAA GCGAA GTGCA CACGG (SEQ ID NO: 5). A chart showing the nucleobase positions of SEQ ID NO: 5 is shown below:

1 2 3 4 5 6 7 8 9 10 11 12 13 14 15 16 17 18 19 20
G T G A A G C G A A G T G C A C A C G G

[0259] In certain embodiments, the compound comprises a modified oligonucleotide described herein. Exemplary modified oligonucleotides include but are not limited to those shown in FIGS. 1-2. In some embodiments, the compound comprises a modified oligonucleotide comprising the sequence of any one of AUS1010 to AUS1714. In some embodiments, the compound comprises a modified oligonucleotide comprising the sequence of any one of SEQ ID NOS: 11 to 666, or a modified oligonucleotide comprising 1, 2, 3, 4, or 5 modifications thereto.

[0260] In certain embodiments, the compound comprises a modified oligonucleotide comprising the sequence of any one of A, B, C, D, E, F, G, H, I, J, K, L, M, N, O, P, Q, R, S, T, U, V, W, X, Y, Z, AA, AB, AC, AD, AE, AF, AG, AH, AI, AJ, AK, AL, AM, AN, AO, AP, AQ, AR, AS, AT, AU, AV, AW or AX. Table 3 shows a correspondence table for the alphabet identifier, the AUS identifier and the SEQ ID NO corresponding to the sequence of the modified oligonucleotide.

TABLE 3
Nomenclature Correspondence Table for Modified Oligonucleotides

| Alphabet | | |
|---|---|---|
| Identifier | AUS Identifier | SEQ ID NO: |
| A | AUS1427/AUS1461 | 390/424 |
| B | AUS1422 | 385 |
| C | AUS1423 | 386 |
| D | AUS1424 | 387 |
| E | AUS1425 | 388 |
| F | AUS1426 | 389 |
| G | AUS1428 | 391 |
| H | AUS1458 | 421 |
| I | AUS1459 | 422 |
| J | AUS1460 | 423 |
| K | AUS1322 | 294 |
| L | AUS1326 | 298 |
| M | AUS1439 | 402 |
| N | AUS1443 | 406 |
| O | AUS1444 | 407 |
| P | AUS1462 | 425 |
| Q | AUS1499 | 462 |
| R | AUS1500 | 463 |
| S | AUS1465 | 428 |
| T | AUS1469 | 432 |
| U | AUS1475 | 438 |
| V | AUS1473 | 436 |
| W | AUS1472 | 435 |
| X | AUS1474 | 437 |
| Y | AUS1478 | 441 |
| Z | AUS1479 | 442 |
| AA | AUS1494 | 457 |
| AB | AUS1463 | 426 |
| AC | AUS1468 | 431 |
| AD | AUS1466/AUS1495 | 429/458 |
| AE | AUS1429 | 392 |
| AF | AUS1431 | 394 |
| AG | AUS1436 | 399 |
| AH | AUS1437 | 400 |
| AI | AUS1441 | 404 |
| AJ | AUS1464 | 427 |
| AK | AUS1467 | 430 |
| AL | AUS1470 | 433 |
| AM | AUS1471 | 434 |
| AN | AUS1477 | 440 |
| AO | AUS1476/AUS1493 | 439/456 |
| AP | AUS1430 | 393 |
| AQ | AUS1432 | 395 |
| AR | AUS1440 | 403 |
| AS | AUS1438 | 401 |
| AT | AUS1489 | 452 |
| AU | AUS1488/AUS1497 | 451/460 |
| AV | AUS1490 | 453 |
| AW | AUS1498 | 461 |
| AX | AUS1433 | 396 |

### Features of Modified Oligonucleotides

[0261] In certain embodiments, the compound comprises a modified oligonucleotide of 20 linked nucleosides consisting of: a first gap segment consisting of linked nucleosides; a second gap segment consisting of linked nucleosides; a separator segment consisting of a nucleoside linked to the first gap segment and the second gap segment; a 5′ wing segment consisting of linked nucleosides; and a 3′ wing segment consisting of linked nucleosides; wherein the first gap segment, separator segment, and second gap segment are positioned between the 5′ wing segment and the 3′ wing segment; wherein the first gap segment is attached to the 5′ wing segment, and the second gap segment is attached to the 3′ wing segment, wherein the first gap segment, separator segment, and second gap segment, taken together, consist of 8 or 9 or 10 or 11 or 12 linked nucleosides.

[0262] In certain embodiments, the compound comprises a modified oligonucleotide of 20 linked nucleosides consisting of: a first gap segment consisting of linked nucleosides; a second gap segment consisting of linked nucleosides; a separator segment consisting of a nucleoside linked between the first gap segment and the second gap segment; wherein the first gap segment, the separator segment, and the second gap segment, taken together, consist of 8 or 9 or 10 or 11 or 12 nucleotides; a 5′ wing segment consisting of linked nucleosides; and a 3′ wing segment consisting of linked nucleosides; wherein the first gap segment, second gap segment, and separator segment are positioned between the 5′ wing segment and the 3′ wing segment; wherein the first gap segment is attached to the 5′ wing segment, and the second gap segment is attached to the 3′ wing segment; wherein the first gap segment consists of linked nucleosides with 2′-deoxy sugars; wherein the second gap segment consists of linked nucleosides with 2′-deoxy sugars; wherein the separator segment consists of one nucleoside comprising a 2′-O(CH₂)₂—OCH₃ sugar or a 2′—OCH₃ sugar, wherein the modified oligonucleotide is at least 95% complementary to SEQ ID NO: 1; and wherein said modified oligonucleotide has a nucleobase sequence of SEQ ID NO: 2 (GCAGA GGTGA AGCGA AGTGC).

[0263] In certain embodiments, the compound comprises a modified oligonucleotide of 20 linked nucleosides consisting of: a first gap segment consisting of linked nucleosides; a second gap segment consisting of linked nucleosides; a separator segment consisting of a nucleoside linked between the first gap segment and the second gap segment; wherein the first gap segment, the separator segment, and the second gap segment, taken together, consist of 8 or 9 or 10 or 11 or 12 nucleotides; a 5′ wing segment consisting of linked nucleosides; and a 3′ wing segment consisting of linked nucleosides; wherein the first gap segment, second gap segment, and separator segment are positioned between the 5′ wing segment and the 3′ wing segment; wherein the first gap segment is attached to the 5′ wing segment, and the second gap segment is attached to the 3′ wing segment; wherein the first gap segment consists of linked nucleosides with 2′-deoxy sugars; wherein the second gap segment consists of linked nucleosides with 2′-deoxy sugars; wherein the separator segment consists of one nucleoside comprising a 2′-O(CH₂)₂—OCH₃ sugar or a 2′—OCH₃ sugar, wherein at least one of the nucleosides in the 5′ wing segment comprises a 2′-O(CH₂)₂—OCH₃ sugar; and wherein at least one of the nucleosides in the 3′ wing segment comprises a 2′-O(CH₂)₂—OCH₃ sugar; wherein the modified oligonucleotide is at least 95% complementary to SEQ ID NO: 1; and wherein said modified oligonucleotide has a nucleobase sequence of SEQ ID NO: 2 (GCAGA GGTGA AGCGA AGTGC).

### A. 5′ Wing Segment, General

[0264] In certain embodiments, at least one of the nucleosides in the 5′ wing segment comprises a 2′-O(CH₂)₂—OCH₃ sugar. In certain embodiments, each of the nucleosides in the 5′ wing segment comprises a 2′-O(CH₂)₂—OCH₃ sugar. In certain embodiments, the 5′ wing segment comprises a nucleoside with a 2′-deoxy sugar. In certain embodiments, the 5′ wing segment comprises a nucleoside with a 2′-deoxy sugar, and the other nucleosides in the 5′ wing segment comprise a 2′-O(CH₂)₂—OCH₃ sugar. In certain embodiments, the nucleoside at position 2 of SEQ ID NO: 2 comprises a 2′-deoxy sugar. In certain embodiments, the nucleoside at position 3 of SEQ ID NO: 2 comprises a 2′-deoxy sugar. In certain embodiments, the nucleoside at position 4 of SEQ ID NO: 2 comprises a 2′-deoxy sugar. In certain embodiments, the 5′ wing segment further comprises two nucleosides each with a 2′-deoxy sugar. In certain embodiments, the nucleosides at positions 2 and 3 of SEQ ID NO: 2 comprise a 2′-deoxy sugar. In certain embodiments, the nucleosides at positions 2 and 4 of SEQ ID NO: 2 comprise a 2′-deoxy sugar. In certain embodiments, the nucleosides at positions 3 and 4 of SEQ ID NO: 2 comprise a 2′-deoxy sugar. In certain embodiments, the nucleosides at positions 2 and 5 of SEQ ID NO: 2 comprise a 2′-deoxy sugar.

[0265] In certain embodiments, one, two, three, or four of the nucleosides in the 5′ wing segment comprise a sugar modification described herein. In certain embodiments, one, two, three, or four of the nucleosides in the 5′ wing segment comprise a bicyclic sugar. In certain embodiments, one, two, three, or four of the nucleosides in the 5′ wing segment comprise a constrained ethyl sugar.

[0266] In certain embodiments, one, two, three, or four of the nucleosides in the 5′ wing segment comprise a locked nucleic acid. In certain embodiments, one, two, three, or four of the nucleosides in the 5′ wing segment comprise a 4′-CH₂—O-2′ sugar. In certain embodiments, two of the nucleosides in the 5′ wing segment comprise a locked nucleic acid. In certain embodiments, two of the nucleosides in the 5′ wing segment comprise a 4′-CH₂—O-2′ sugar. In certain embodiments, the nucleosides at positions 1 and 3 of SEQ ID NO: 2 comprise a locked nucleic acid. In certain embodiments, the nucleosides at positions 1 and 3 of SEQ ID NO: 2 comprise a 4′-CH₂—O-2′ sugar.

### B1. 5′ Wing Segment w/4 Linked Nucleosides

[0267] In certain embodiments, the 5′ wing segment consists of 4 linked nucleosides. In certain embodiments, the 5′ wing segment consists of 4 linked nucleosides, wherein each of the 4 linked nucleosides comprise a nucleoside with a 2′-O(CH₂)₂—OCH₃ sugar. In certain embodiments, the 5′ wing segment consists of 4 linked nucleosides, wherein 3 of the 4 linked nucleosides comprise a nucleoside with a 2′-O(CH₂)₂—OCH₃ sugar. In certain embodiments, the 5′ wing segment consists of 4 linked nucleosides, wherein 2 of the 4 linked nucleosides comprise a nucleoside with a 2′-O(CH₂)₂—OCH₃ sugar. In certain embodiments, the 5′ wing segment consists of 4 linked nucleosides, wherein 1 of the 4 linked nucleosides comprises a nucleoside with a 2′-O(CH₂)₂—OCH₃ sugar.

### B2. 5′ Wing Segment w/4 Linked Nucleosides, 2′-Deoxy Combinations

[0268] In certain embodiments, the 5′ wing segment consists of 4 linked nucleosides, wherein one of the linked nucleosides comprises a nucleoside with a 2′-deoxy sugar. In certain embodiments, the 5′ wing segment consists of 4 linked nucleosides, wherein two of the linked nucleosides comprises a nucleoside with a 2′-deoxy sugar. In certain embodiments, the 5′ wing segment consists of 4 linked nucleosides, wherein one of the 4 linked nucleosides comprises a nucleoside with a 2′-deoxy sugar, and each of the other 3 linked nucleosides comprise a nucleoside with a 2′-O(CH₂)₂—OCH₃ sugar. In certain embodiments, the 5′ wing segment consists of 4 linked nucleosides, wherein one of the 4 linked nucleosides comprises a nucleoside with a 2′-deoxy sugar, one of the 4 linked nucleosides comprises a locked nucleic acid, and each of the other 2 linked nucleosides comprise a nucleoside with a 2′-O(CH₂)₂—OCH₃ sugar. In certain embodiments, the 5′ wing segment consists of 4 linked nucleosides, wherein one of the 4 linked nucleosides comprises a nucleoside with a 2′-deoxy sugar, two of the 4 linked nucleosides comprise a locked nucleic acid, and the other linked nucleoside comprises a nucleoside with a 2′-O(CH₂)₂—OCH₃ sugar.

[0269] In certain embodiments, the 5′ wing segment consists of 4 linked nucleosides, wherein the nucleoside at position 2 of SEQ ID NO: 2 comprises a 2′-deoxy sugar. In certain embodiments, the 5′ wing segment consists of 4 linked nucleosides, wherein the nucleoside at position 2 of SEQ ID NO: 2 comprises a 2′-deoxy sugar, and each of the other 3 linked nucleosides comprise a nucleoside with a 2′-O(CH₂)₂—OCH₃ sugar. In certain embodiments, the 5′ wing segment consists of 4 linked nucleosides, wherein the nucleoside at position 3 of SEQ ID NO: 2 comprises a 2′-deoxy sugar. In certain embodiments, the 5′ wing segment consists of 4 linked nucleosides, wherein the nucleoside at position 3 of SEQ ID NO: 2 comprises a 2′-deoxy sugar, and each of the other 3 linked nucleosides comprise a nucleoside with a 2′-O(CH₂)₂—OCH₃ sugar. In certain embodiments, the 5′ wing segment consists of 4 linked nucleosides, wherein the nucleoside at position 4 of SEQ ID NO: 2 comprises a 2′-deoxy sugar. In certain embodiments, the 5′ wing segment consists of 4 linked nucleosides, wherein the nucleoside at position 4 of SEQ ID NO: 2 comprises a 2′-deoxy sugar, and each of the other 3 linked nucleosides comprise a nucleoside with a 2′-O(CH₂)₂—OCH₃ sugar.

[0270] In certain embodiments, the 5′ wing segment consists of 4 linked nucleosides, wherein the nucleosides at positions 2 and 3 of SEQ ID NO: 2 comprise a 2′-deoxy sugar. In certain embodiments, the 5′ wing segment consists of 4 linked nucleosides, wherein the nucleosides at positions 2 and 3 of SEQ ID NO: 2 comprise a 2′-deoxy sugar, and each of the other 2 linked nucleosides comprise a nucleoside with a 2′-O(CH₂)₂—OCH₃ sugar. In certain embodiments, the 5′ wing segment consists of 4 linked nucleosides, wherein the nucleosides at positions 2 and 4 of SEQ ID NO: 2 comprise a 2′-deoxy sugar. In certain embodiments, the 5′ wing segment consists of 4 linked nucleosides, wherein the nucleosides at positions 2 and 4 of SEQ ID NO: 2 comprise a 2′-deoxy sugar, and each of the other 2 linked nucleosides comprise a nucleoside with a 2′-O(CH₂)₂—OCH₃ sugar. In certain embodiments, the 5′ wing segment consists of 4 linked nucleosides, wherein the nucleosides at positions 3 and 4 of SEQ ID NO: 2 comprise a 2′-deoxy sugar. In certain embodiments, the 5′ wing segment consists of 4 linked nucleosides, wherein the nucleosides at positions 3 and 4 of SEQ ID NO: 2 comprise a 2′-deoxy sugar, and each of the other 2 linked nucleosides comprise a nucleoside with a 2′-O(CH₂)₂—OCH₃ sugar.

### B3. 5′ Wing Segment w/4 Linked Nucleosides, 2′-LNA Combinations

[0271] In certain embodiments, the 5′ wing segment consists of 4 linked nucleosides, wherein one of the 4 linked nucleosides comprise a locked nucleic acid. In certain embodiments, the 5′ wing segment consists of 4 linked nucleosides, wherein two of the 4 linked nucleosides comprise a locked nucleic acid. In certain embodiments, the 5′ wing segment consists of 4 linked nucleosides, wherein one of the 4 linked nucleosides comprise a 4′-CH₂—O-2′ sugar. In certain embodiments, the 5′ wing segment consists of 4 linked nucleosides, wherein two of the 4 linked nucleosides comprise a 4′-CH₂—O-2′ sugar.

[0272] In certain embodiments, the 5′ wing segment consists of 4 linked nucleosides, wherein one of the 4 linked nucleosides comprise a locked nucleic acid, and each of the other 3 linked nucleosides comprise a nucleoside with a 2′-O(CH₂)₂—OCH₃ sugar. In certain embodiments, the 5′ wing segment consists of 4 linked nucleosides, wherein two of the 4 linked nucleosides comprise a locked nucleic acid, and each of the other 2 linked nucleosides comprise a nucleoside with a 2′-O(CH₂)₂—OCH₃ sugar. In certain embodiments, the 5′ wing segment consists of 4 linked nucleosides, wherein one of the 4 linked nucleosides comprise a 4′-CH₂—O-2′ sugar, and each of the other 3 linked nucleosides comprise a nucleoside with a 2′-O(CH₂)₂—OCH₃ sugar. In certain embodiments, the 5′ wing segment consists of 4 linked nucleosides, wherein two of the 4 linked nucleosides comprise a 4′-CH₂—O-2′ sugar, and each of the other 2 linked nucleosides comprise a nucleoside with a 2′-O(CH₂)₂—OCH₃ sugar.

[0273] In certain embodiments, the 5′ wing segment consists of 4 linked nucleosides, and the nucleosides at positions 1 and 3 of SEQ ID NO: 2 comprise a locked nucleic acid. In certain embodiments, the 5′ wing segment consists of 4 linked nucleosides, and the nucleosides at positions 1 and 3 of SEQ ID NO: 2 comprise a 4′-CH₂—O-2′ sugar.

[0274] In certain embodiments, the 5′ wing segment consists of 4 linked nucleosides, and the nucleosides at positions 1 and 3 of SEQ ID NO: 2 comprise a locked nucleic acid, and each of the other 2 linked nucleosides comprise a nucleoside with a 2′-O(CH₂)₂—OCH₃ sugar. In certain embodiments, the 5′ wing segment consists of 4 linked nucleosides, and the nucleosides at positions 1 and 3 of SEQ ID NO: 2 comprise a 4′-CH₂—O-2′ sugar, and each of the other 2 linked nucleosides comprise a nucleoside with a 2′-O(CH₂)₂—OCH₃ sugar.

### C1. 5′ Wing Segment w/5 Linked Nucleosides

[0275] In certain embodiments, the 5′ wing segment consists of 5 linked nucleosides. In certain embodiments, the 5′ wing segment consists of 5 linked nucleosides, wherein each of the 5 linked nucleosides comprise a nucleoside with a 2′-O(CH₂)₂—OCH₃ sugar. In certain embodiments, the 5′ wing segment consists of 5 linked nucleosides, wherein 4 of the 5 linked nucleosides comprise a nucleoside with a 2′-O(CH₂)₂—OCH₃ sugar. In certain embodiments, the 5′ wing segment consists of 5 linked nucleosides, wherein 3 of the 5 linked nucleosides comprise a nucleoside with a 2′-O(CH₂)₂—OCH₃ sugar. In certain embodiments, the 5′ wing segment consists of 5 linked nucleosides, wherein 2 of the 5 linked nucleosides comprises a nucleoside with a 2′-O(CH₂)₂—OCH₃ sugar. In certain embodiments, the 5′ wing segment consists of 5 linked nucleosides, wherein 1 of the 5 linked nucleosides comprises a nucleoside with a 2′-O(CH₂)₂—OCH₃ sugar.

### C2. 5′ Wing Segment w/5 Linked Nucleosides, 2′-Deoxy Combinations

[0276] In certain embodiments, the 5′ wing segment consists of 5 linked nucleosides, wherein one of the linked nucleosides comprises a nucleoside with a 2′-deoxy sugar. In certain embodiments, the 5′ wing segment consists of 5 linked nucleosides, wherein two of the linked nucleosides comprises a nucleoside with a 2′-deoxy sugar. In certain embodiments, the 5′ wing segment consists of 5 linked nucleosides, wherein one of the 5 linked nucleosides comprises a nucleoside with a 2′-deoxy sugar, and each of the other 4 linked nucleosides comprise a nucleoside with a 2′-O(CH₂)₂—OCH₃ sugar. In certain embodiments, the 5′ wing segment consists of 5 linked nucleosides, wherein one of the 5 linked nucleosides comprises a nucleoside with a 2′-deoxy sugar, one of the 5 linked nucleosides comprises a locked nucleic acid, and each of the other 3 linked nucleosides comprise a nucleoside with a 2′-O(CH₂)₂—OCH₃ sugar. In certain embodiments, the 5′ wing segment consists of 5 linked nucleosides, wherein one of the 5 linked nucleosides comprises a nucleoside with a 2′-deoxy sugar, two of the 5 linked nucleosides comprise a locked nucleic acid, and the other 2 linked nucleosides comprises a nucleoside with a 2′-O(CH₂)₂—OCH₃ sugar.

[0277] In certain embodiments, the 5′ wing segment consists of 5 linked nucleosides, wherein the nucleoside at position 2 of SEQ ID NO: 2 comprises a 2′-deoxy sugar. In certain embodiments, the 5′ wing segment consists of 5 linked nucleosides, wherein the nucleoside at position 2 of SEQ ID NO: 2 comprises a 2′-deoxy sugar, and each of the other 4 linked nucleosides comprise a nucleoside with a 2′-O(CH₂)₂—OCH₃ sugar. In certain embodiments, the 5′ wing segment consists of 5 linked nucleosides, wherein the nucleoside at position 3 of SEQ ID NO: 2 comprises a 2′-deoxy sugar. In certain embodiments, the 5′ wing segment consists of 5 linked nucleosides, wherein the nucleoside at position 3 of SEQ ID NO: 2 comprises a 2′-deoxy sugar, and each of the other 4 linked nucleosides comprise a nucleoside with a 2′-O(CH₂)₂—OCH₃ sugar. In certain embodiments, the 5′ wing segment consists of 5 linked nucleosides, wherein the nucleoside at position 4 of SEQ ID NO: 2 comprises a 2′-deoxy sugar. In certain embodiments, the 5′ wing segment consists of 5 linked nucleosides, wherein the nucleoside at position 4 of SEQ ID NO: 2 comprises a 2′-deoxy sugar, and each of the other 4 linked nucleosides comprise a nucleoside with a 2′-O(CH₂)₂—OCH₃ sugar.

[0278] In certain embodiments, the 5′ wing segment consists of 5 linked nucleosides, wherein the nucleosides at positions 2 and 3 of SEQ ID NO: 2 comprise a 2′-deoxy sugar. In certain embodiments, the 5′ wing segment consists of 5 linked nucleosides, wherein the nucleosides at positions 2 and 3 of SEQ ID NO: 2 comprise a 2′-deoxy sugar, and each of the other 3 linked nucleosides comprise a nucleoside with a 2′-O(CH₂)₂—OCH₃ sugar. In certain embodiments, the 5′ wing segment consists of 5 linked nucleosides, wherein the nucleosides at positions 2 and 4 of SEQ ID NO: 2 comprise a 2′-deoxy sugar. In certain embodiments, the 5′ wing segment consists of 5 linked nucleosides, wherein the nucleosides at positions 2 and 4 of SEQ ID NO: 2 comprise a 2′-deoxy sugar, and each of the other 3 linked nucleosides comprise a nucleoside with a 2′-O(CH₂)₂—OCH₃ sugar. In certain embodiments, the 5′ wing segment consists of 5 linked nucleosides, wherein the nucleosides at positions 3 and 4 of SEQ ID NO: 2 comprise a 2′-deoxy sugar. In certain embodiments, the 5′ wing segment consists of 5 linked nucleosides, wherein the nucleosides at positions 3 and 4 of SEQ ID NO: 2 comprise a 2′-deoxy sugar, and each of the other 3 linked nucleosides comprise a nucleoside with a 2′-O(CH₂)₂—OCH₃ sugar.

### C3. 5′ Wing Segment w/5 Linked Nucleosides, 2′-LNA Combinations

[0279] In certain embodiments, the 5′ wing segment consists of 5 linked nucleosides, wherein one of the 5 linked nucleosides comprise a locked nucleic acid. In certain embodiments, the 5′ wing segment consists of 5 linked nucleosides, wherein two of the 5 linked nucleosides comprise a locked nucleic acid. In certain embodiments, the 5′ wing segment consists of 5 linked nucleosides, wherein one of the 5 linked nucleosides comprise a 4′-CH₂—O-2′ sugar. In certain embodiments, the 5′ wing segment consists of 5 linked nucleosides, wherein two of the 5 linked nucleosides comprise a 4′-CH₂—O-2′ sugar.

[0280] In certain embodiments, the 5′ wing segment consists of 5 linked nucleosides, wherein one of the 5 linked nucleosides comprise a locked nucleic acid, and each of the other 4 linked nucleosides comprise a nucleoside with a 2′-O(CH₂)₂—OCH₃ sugar. In certain embodiments, the 5′ wing segment consists of 5 linked nucleosides, wherein two of the 5 linked nucleosides comprise a locked nucleic acid, and each of the other 3 linked nucleosides comprise a nucleoside with a 2′-O(CH₂)₂—OCH₃ sugar. In certain embodiments, the 5′ wing segment consists of 5 linked nucleosides, wherein one of the 5 linked nucleosides comprise a 4′-CH₂—O-2′ sugar, and each of the other 4 linked nucleosides comprise a nucleoside with a 2′-O(CH₂)₂—OCH₃ sugar. In certain embodiments, the 5′ wing segment consists of 5 linked nucleosides, wherein two of the 5 linked nucleosides comprise a 4′-CH₂—O-2′ sugar, and each of the other 3 linked nucleosides comprise a nucleoside with a 2′-O(CH₂)₂—OCH₃ sugar.

[0281] In certain embodiments, the 5′ wing segment consists of 5 linked nucleosides, and the nucleosides at positions 1 and 3 of SEQ ID NO: 2 comprise a locked nucleic acid. In certain embodiments, the 5′ wing segment consists of 5 linked nucleosides, and the nucleosides at positions 1 and 3 of SEQ ID NO: 2 comprise a 4′-CH₂—O-2′ sugar.

[0282] In certain embodiments, the 5′ wing segment consists of 5 linked nucleosides, and the nucleosides at positions 1 and 3 of SEQ ID NO: 2 comprise a locked nucleic acid, and each of the other 3 linked nucleosides comprise a nucleoside with a 2′-O(CH₂)₂—OCH₃ sugar. In certain embodiments, the 5′ wing segment consists of 5 linked nucleosides, and the nucleosides at positions 1 and 3 of SEQ ID NO: 2 comprise a 4′-CH₂—O-2′ sugar, and each of the other 3 linked nucleosides comprise a nucleoside with a 2′-O(CH₂)₂—OCH₃ sugar.

### D. 3′ Wing Segment, General

[0283] In certain embodiments, at least one of the nucleosides in the 3′ wing segment comprises a 2′-O(CH₂)₂—OCH₃ sugar. In certain embodiments, each of the nucleosides in the 3′ wing segment comprise a 2′-O(CH₂)₂—OCH₃ sugar. In certain embodiments, the 3′ wing segment comprises a nucleoside with a 2′-deoxy sugar. In certain embodiments, the 3′ wing segment comprises a nucleoside with a 2′-deoxy sugar, and the other nucleosides in the 3′ wing segment comprise a 2′-O(CH₂)₂—OCH₃ sugar. In certain embodiments, the 3′ wing segment further comprises two nucleosides each with a 2′-deoxy sugar.

[0284] In certain embodiments, one, two, three, or four of the nucleosides in the 3′ wing segment comprise a sugar modification described herein. In certain embodiments, one, two, three, or four of the nucleosides in the 3′ wing segment comprise a bicyclic sugar. In certain embodiments, one, two, three, or four of the nucleosides in the 3′ wing segment comprise a constrained ethyl sugar.

[0285] In certain embodiments, one, two, three, or four of the nucleosides in the 3′ wing segment comprise a locked nucleic acid. In certain embodiments, one, two, three, or four of the nucleosides in the 3′ wing segment comprise a 4′-CH₂—O-2′ sugar. In certain embodiments, two of the nucleosides in the 3′ wing segment comprise a locked nucleic acid. In certain embodiments, two of the nucleosides in the 3′ wing segment comprise a 4′-CH₂—O-2′ sugar. In certain embodiments, three of the nucleosides in the 3′ wing segment comprise a locked nucleic acid. In certain embodiments, three of the nucleosides in the 3′ wing segment comprise a 4′-CH₂—O-2′ sugar.

[0286] In certain embodiments, the nucleosides at positions 16 and 18 of SEQ ID NO: 2 comprise a locked nucleic acid. In certain embodiments, the nucleosides at positions 16 and 18 of SEQ ID NO: 2 comprise a 4′-CH₂—O-2′ sugar. In certain embodiments, the nucleosides at positions 16 and 19 of SEQ ID NO: 2 comprise a locked nucleic acid. In certain embodiments, the nucleosides at positions 16 and 19 of SEQ ID NO: 2 comprise a 4′-CH₂—O-2′ sugar. In certain embodiments, the nucleosides at positions 16 and 20 of SEQ ID NO: 2 comprise a locked nucleic acid. In certain embodiments, the nucleosides at positions 16 and 20 of SEQ ID NO: 2 comprise a 4′-CH₂—O-2′ sugar. In certain embodiments, the nucleosides at positions 17 and 18 of SEQ ID NO: 2 comprise a locked nucleic acid. In certain embodiments, the nucleosides at positions 17 and 18 of SEQ ID NO: 2 comprise a 4′-CH₂—O-2′ sugar. In certain embodiments, the nucleosides at positions 17 and 19 of SEQ ID NO: 2 comprise a locked nucleic acid. In certain embodiments, the nucleosides at positions 17 and 19 of SEQ ID NO: 2 comprise a 4′-CH₂—O-2′ sugar. In certain embodiments, the nucleosides at positions 17 and 20 of SEQ ID NO: 2 comprise a locked nucleic acid. In certain embodiments, the nucleosides at positions 17 and 20 of SEQ ID NO: 2 comprise a 4′-CH₂—O-2′ sugar. In certain embodiments, the nucleosides at positions 18 and 19 of SEQ ID NO: 2 comprise a locked nucleic acid. In certain embodiments, the nucleosides at positions 18 and 19 of SEQ ID NO: 2 comprise a 4′-CH₂—O-2′ sugar. In certain embodiments, the nucleosides at positions 18 and 20 of SEQ ID NO: 2 comprise a locked nucleic acid. In certain embodiments, the nucleosides at positions 18 and 20 of SEQ ID NO: 2 comprise a 4′-CH₂—O-2′ sugar. In certain embodiments, the nucleosides at positions 19 and 20 of SEQ ID NO: 2 comprise a locked nucleic acid. In certain embodiments, the nucleosides at positions 19 and 20 of SEQ ID NO: 2 comprise a 4′-CH₂—O-2′ sugar.

[0287] In certain embodiments, the nucleosides at positions 17, 18, and 19 of SEQ ID NO: 2 comprise a locked nucleic acid. In certain embodiments, the nucleosides at positions 17, 18, and 19 of SEQ ID NO: 2 comprise a 4′-CH₂—O-2′ sugar. In certain embodiments, the nucleosides at positions 17, 19, and 20 of SEQ ID NO: 2 comprise a locked nucleic acid. In certain embodiments, the nucleosides at positions 17, 19, and 20 of SEQ ID NO: 2 comprise a 4′-CH₂—O-2′ sugar.

### E1. 3′ Wing Segment w/4 Linked Nucleosides

[0288] In certain embodiments, the 3′ wing segment consists of 4 linked nucleosides. In certain embodiments, the 3′ wing segment consists of 4 linked nucleosides, wherein each of the 4 linked nucleosides comprise a nucleoside with a 2′-O(CH₂)₂—OCH₃ sugar. In certain embodiments, the 3′ wing segment consists of 4 linked nucleosides, wherein 3 of the 4 linked nucleosides comprise a nucleoside with a 2′-O(CH₂)₂—OCH₃ sugar. In certain embodiments, the 3′ wing segment consists of 4 linked nucleosides, wherein 2 of the 4 linked nucleosides comprise a nucleoside with a 2′-O(CH₂)₂—OCH₃ sugar. In certain embodiments, the 3′ wing segment consists of 4 linked nucleosides, wherein 1 of the 4 linked nucleosides comprises a nucleoside with a 2′-O(CH₂)₂—OCH₃ sugar.

### E2. 3′ Wing Segment w/4 Linked Nucleosides, 2′-Deoxy Combinations

[0289] In certain embodiments, the 3′ wing segment consists of 4 linked nucleosides, wherein one of the linked nucleosides comprises a nucleoside with a 2′-deoxy sugar. In certain embodiments, the 3′ wing segment consists of 4 linked nucleosides, wherein two of the linked nucleosides comprises a nucleoside with a 2′-deoxy sugar. In certain embodiments, the 3′ wing segment consists of 4 linked nucleosides, wherein one of the 4 linked nucleosides comprises a nucleoside with a 2′-deoxy sugar, and each of the other 3 linked nucleosides comprise a nucleoside with a 2′-O(CH₂)₂—OCH₃ sugar. In certain embodiments, the 3′ wing segment consists of 4 linked nucleosides, wherein one of the 4 linked nucleosides comprises a nucleoside with a 2′-deoxy sugar, one of the 4 linked nucleosides comprises a locked nucleic acid, and each of the other 2 linked nucleosides comprise a nucleoside with a 2′-O(CH₂)₂—OCH₃ sugar. In certain embodiments, the 3′ wing segment consists of 4 linked nucleosides, wherein one of the 4 linked nucleosides comprises a nucleoside with a 2′-deoxy sugar, two of the 4 linked nucleosides comprise a locked nucleic acid, and the other linked nucleoside comprises a nucleoside with a 2′-O(CH₂)₂—OCH₃ sugar.

### E3. 3′ Wing Segment w/4 Linked Nucleosides, 2′-LNA Combinations

[0290] In certain embodiments, the 3′ wing segment consists of 4 linked nucleosides, wherein one of the 4 linked nucleosides comprise a locked nucleic acid. In certain embodiments, the 3′ wing segment consists of 4 linked nucleosides, wherein two of the 4 linked nucleosides comprise a locked nucleic acid. In certain embodiments, the 3′ wing segment consists of 4 linked nucleosides, wherein one of the 4 linked nucleosides comprise a 4′-CH₂—O-2′ sugar. In certain embodiments, the 3′ wing segment consists of 4 linked nucleosides, wherein two of the 4 linked nucleosides comprise a 4′-CH₂—O-2′ sugar.

[0291] In certain embodiments, the 3′ wing segment consists of 4 linked nucleosides, wherein one of the 4 linked nucleosides comprise a locked nucleic acid, and each of the other 3 linked nucleosides comprise a nucleoside with a 2′-O(CH₂)₂—OCH₃ sugar. In certain embodiments, the 3′ wing segment consists of 4 linked nucleosides, wherein two of the 4 linked nucleosides comprise a locked nucleic acid, and each of the other 2 linked nucleosides comprise a nucleoside with a 2′-O(CH₂)₂—OCH₃ sugar. In certain embodiments, the 3′ wing segment consists of 4 linked nucleosides, wherein three of the 4 linked nucleosides comprise a locked nucleic acid, and the other linked nucleoside comprises a nucleoside with a 2′-O(CH₂)₂—OCH₃ sugar. In certain embodiments, the 3′ wing segment consists of 4 linked nucleosides, wherein one of the 4 linked nucleosides comprise a 4′-CH₂—O-2′ sugar, and each of the other 3 linked nucleosides comprise a nucleoside with a 2′-O(CH₂)₂—OCH₃ sugar. In certain embodiments, the 3′ wing segment consists of 4 linked nucleosides, wherein two of the 4 linked nucleosides comprise a 4′-CH₂—O-2′ sugar, and each of the other 2 linked nucleosides comprise a nucleoside with a 2′-O(CH₂)₂—OCH₃ sugar. In certain embodiments, the 3′ wing segment consists of 4 linked nucleosides, wherein three of the 4 linked nucleosides comprise a 4′-CH₂—O-2′ sugar, and the other linked nucleoside comprises a nucleoside with a 2′-O(CH₂)₂—OCH₃ sugar.

[0292] In certain embodiments, the 3′ wing segment consists of 4 linked nucleosides, and the nucleosides at positions 16 and 18 of SEQ ID NO: 2 comprise a locked nucleic acid. In certain embodiments, the 3′ wing segment consists of 4 linked nucleosides, and the nucleosides at positions 16 and 18 of SEQ ID NO: 2 comprise a 4′-CH₂—O-2′ sugar.

[0293] In certain embodiments, the 3′ wing segment consists of 4 linked nucleosides, and the nucleosides at positions 16 and 18 of SEQ ID NO: 2 comprise a locked nucleic acid, and each of the other 2 linked nucleosides comprise a nucleoside with a 2′-O(CH₂)₂—OCH₃ sugar. In certain embodiments, the 3′ wing segment consists of 4 linked nucleosides, and the nucleosides at positions 16 and 18 of SEQ ID NO: 2 comprise a 4′-CH₂—O-2′ sugar, and each of the other 2 linked nucleosides comprise a nucleoside with a 2′-O(CH₂)₂—OCH₃ sugar.

[0294] In certain embodiments, the 3′ wing segment consists of 4 linked nucleosides, and the nucleosides at positions 16 and 19 of SEQ ID NO: 2 comprise a locked nucleic acid. In certain embodiments, the 3′ wing segment consists of 4 linked nucleosides, and the nucleosides at positions 16 and 19 of SEQ ID NO: 2 comprise a 4′-CH₂—O-2′ sugar.

[0295] In certain embodiments, the 3′ wing segment consists of 4 linked nucleosides, and the nucleosides at positions 16 and 19 of SEQ ID NO: 2 comprise a locked nucleic acid, and each of the other 2 linked nucleosides comprise a nucleoside with a 2′-O(CH₂)₂—OCH₃ sugar. In certain embodiments, the 3′ wing segment consists of 4 linked nucleosides, and the nucleosides at positions 16 and 19 of SEQ ID NO: 2 comprise a 4′-CH₂—O-2′ sugar, and each of the other 2 linked nucleosides comprise a nucleoside with a 2′-O(CH₂)₂—OCH₃ sugar.

[0296] In certain embodiments, the 3′ wing segment consists of 4 linked nucleosides, and the nucleosides at positions 16 and 20 of SEQ ID NO: 2 comprise a locked nucleic acid. In certain embodiments, the 3′ wing segment consists of 4 linked nucleosides, and the nucleosides at positions 16 and 20 of SEQ ID NO: 2 comprise a 4′-CH₂—O-2′ sugar.

[0297] In certain embodiments, the 3′ wing segment consists of 4 linked nucleosides, and the nucleosides at positions 16 and 20 of SEQ ID NO: 2 comprise a locked nucleic acid, and each of the other 2 linked nucleosides comprise a nucleoside with a 2′-O(CH₂)₂—OCH₃ sugar. In certain embodiments, the 3′ wing segment consists of 4 linked nucleosides, and the nucleosides at positions 16 and 20 of SEQ ID NO: 2 comprise a 4′-CH₂—O-2′ sugar, and each of the other 2 linked nucleosides comprise a nucleoside with a 2′-O(CH₂)₂—OCH₃ sugar.

[0298] In certain embodiments, the 3′ wing segment consists of 4 linked nucleosides, and the nucleosides at positions 17 and 18 of SEQ ID NO: 2 comprise a locked nucleic acid. In certain embodiments, the 3′ wing segment consists of 4 linked nucleosides, and the nucleosides at positions 17 and 18 of SEQ ID NO: 2 comprise a 4′-CH₂—O-2′ sugar.

[0299] In certain embodiments, the 3′ wing segment consists of 4 linked nucleosides, and the nucleosides at positions 17 and 18 of SEQ ID NO: 2 comprise a locked nucleic acid, and each of the other 2 linked nucleosides comprise a nucleoside with a 2′-O(CH₂)₂—OCH₃ sugar. In certain embodiments, the 3′ wing segment consists of 4 linked nucleosides, and the nucleosides at positions 17 and 18 of SEQ ID NO: 2 comprise a 4′-CH₂—O-2′ sugar, and each of the other 2 linked nucleosides comprise a nucleoside with a 2′-O(CH₂)₂—OCH₃ sugar.

[0300] In certain embodiments, the 3′ wing segment consists of 4 linked nucleosides, and the nucleosides at positions 17 and 19 of SEQ ID NO: 2 comprise a locked nucleic acid. In certain embodiments, the 3′ wing segment consists of 4 linked nucleosides, and the nucleosides at positions 17 and 19 of SEQ ID NO: 2 comprise a 4′-CH₂—O-2′ sugar.

[0301] In certain embodiments, the 3′ wing segment consists of 4 linked nucleosides, and the nucleosides at positions 17 and 19 of SEQ ID NO: 2 comprise a locked nucleic acid, and each of the other 2 linked nucleosides comprise a nucleoside with a 2′-O(CH₂)₂—OCH₃ sugar. In certain embodiments, the 3′ wing segment consists of 4 linked nucleosides, and the nucleosides at positions 17 and 19 of SEQ ID NO: 2 comprise a 4′-CH₂—O-2′ sugar, and each of the other 2 linked nucleosides comprise a nucleoside with a 2′-O(CH₂)₂—OCH₃ sugar.

[0302] In certain embodiments, the 3′ wing segment consists of 4 linked nucleosides, and the nucleosides at positions 17 and 20 of SEQ ID NO: 2 comprise a locked nucleic acid. In certain embodiments, the 3′ wing segment consists of 4 linked nucleosides, and the nucleosides at positions 17 and 20 of SEQ ID NO: 2 comprise a 4′-CH₂—O-2′ sugar.

[0303] In certain embodiments, the 3′ wing segment consists of 4 linked nucleosides, and the nucleosides at positions 17 and 20 of SEQ ID NO: 2 comprise a locked nucleic acid, and each of the other 2 linked nucleosides comprise a nucleoside with a 2′-O(CH₂)₂—OCH₃ sugar. In certain embodiments, the 3′ wing segment consists of 4 linked nucleosides, and the nucleosides at positions 17 and 20 of SEQ ID NO: 2 comprise a 4′-CH₂—O-2′ sugar, and each of the other 2 linked nucleosides comprise a nucleoside with a 2′-O(CH₂)₂—OCH₃ sugar.

[0304] In certain embodiments, the 3′ wing segment consists of 4 linked nucleosides, and the nucleosides at positions 18 and 19 of SEQ ID NO: 2 comprise a locked nucleic acid. In certain embodiments, the 3′ wing segment consists of 4 linked nucleosides, and the nucleosides at positions 18 and 19 of SEQ ID NO: 2 comprise a 4′-CH₂—O-2′ sugar.

[0305] In certain embodiments, the 3′ wing segment consists of 4 linked nucleosides, and the nucleosides at positions 18 and 19 of SEQ ID NO: 2 comprise a locked nucleic acid, and each of the other 2 linked nucleosides comprise a nucleoside with a 2′-O(CH₂)₂—OCH₃ sugar. In certain embodiments, the 3′ wing segment consists of 4 linked nucleosides, and the nucleosides at positions 18 and 19 of SEQ ID NO: 2 comprise a 4′-CH₂—O-2′ sugar, and each of the other 2 linked nucleosides comprise a nucleoside with a 2′-O(CH₂)₂—OCH₃ sugar.

[0306] In certain embodiments, the 3′ wing segment consists of 4 linked nucleosides, and the nucleosides at positions 18 and 20 of SEQ ID NO: 2 comprise a locked nucleic acid. In certain embodiments, the 3′ wing segment consists of 4 linked nucleosides, and the nucleosides at positions 18 and 20 of SEQ ID NO: 2 comprise a 4′-CH₂—O-2′ sugar.

[0307] In certain embodiments, the 3′ wing segment consists of 4 linked nucleosides, and the nucleosides at positions 18 and 20 of SEQ ID NO: 2 comprise a locked nucleic acid, and each of the other 2 linked nucleosides comprise a nucleoside with a 2′-O(CH₂)₂—OCH₃ sugar. In certain embodiments, the 3′ wing segment consists of 4 linked nucleosides, and the nucleosides at positions 18 and 20 of SEQ ID NO: 2 comprise a 4′-CH₂—O-2′ sugar, and each of the other 2 linked nucleosides comprise a nucleoside with a 2′-O(CH₂)₂—OCH₃ sugar.

[0308] In certain embodiments, the 3′ wing segment consists of 4 linked nucleosides, and the nucleosides at positions 19 and 20 of SEQ ID NO: 2 comprise a locked nucleic acid. In certain embodiments, the 3′ wing segment consists of 4 linked nucleosides, and the nucleosides at positions 19 and 20 of SEQ ID NO: 2 comprise a 4′-CH₂—O-2′ sugar.

[0309] In certain embodiments, the 3′ wing segment consists of 4 linked nucleosides, and the nucleosides at positions 19 and 20 of SEQ ID NO: 2 comprise a locked nucleic acid, and each of the other 2 linked nucleosides comprise a nucleoside with a 2′-O(CH₂)₂—OCH₃ sugar. In certain embodiments, the 3′ wing segment consists of 4 linked nucleosides, and the nucleosides at positions 19 and 20 of SEQ ID NO: 2 comprise a 4′-CH₂—O-2′ sugar, and each of the other 2 linked nucleosides comprise a nucleoside with a 2′-O(CH₂)₂—OCH₃ sugar.

[0310] In certain embodiments, the 3′ wing segment consists of 4 linked nucleosides, and the nucleosides at positions 17, 18 and 19 of SEQ ID NO: 2 comprise a locked nucleic acid. In certain embodiments, the 3′ wing segment consists of 4 linked nucleosides, and the nucleosides at positions 17, 18 and 19 of SEQ ID NO: 2 comprise a 4′-CH₂—O-2′ sugar.

[0311] In certain embodiments, the 3′ wing segment consists of 4 linked nucleosides, and the nucleosides at positions 17, 18 and 19 of SEQ ID NO: 2 comprise a locked nucleic acid, and the other linked nucleoside comprises a nucleoside with a 2′-O(CH₂)₂—OCH₃ sugar. In certain embodiments, the 3′ wing segment consists of 4 linked nucleosides, and the nucleosides at positions 17, 18 and 19 of SEQ ID NO: 2 comprise a 4′-CH₂—O-2′ sugar, and the other linked nucleoside comprises a nucleoside with a 2′-O(CH₂)₂—OCH₃ sugar.

[0312] In certain embodiments, the 3′ wing segment consists of 4 linked nucleosides, and the nucleosides at positions 17, 19 and 20 of SEQ ID NO: 2 comprise a locked nucleic acid. In certain embodiments, the 3′ wing segment consists of 4 linked nucleosides, and the nucleosides at positions 17, 19 and 20 of SEQ ID NO: 2 comprise a 4′-CH₂—O-2′ sugar.

[0313] In certain embodiments, the 3′ wing segment consists of 4 linked nucleosides, and the nucleosides at positions 17, 19 and 20 of SEQ ID NO: 2 comprise a locked nucleic acid, and the other linked nucleoside comprises a nucleoside with a 2′-O(CH₂)₂—OCH₃ sugar. In certain embodiments, the 3′ wing segment consists of 4 linked nucleosides, and the nucleosides at positions 17, 19 and 20 of SEQ ID NO: 2 comprise a 4′-CH₂—O-2′ sugar, and the other linked nucleoside comprises a nucleoside with a 2′-O(CH₂)₂—OCH₃ sugar.

### F1. 3′ Wing Segment w/5 Linked Nucleosides

[0314] In certain embodiments, the 3′ wing segment consists of 5 linked nucleosides. In certain embodiments, the 3′ wing segment consists of 5 linked nucleosides, wherein each of the 5 linked nucleosides comprise a nucleoside with a 2′-O(CH₂)₂—OCH₃ sugar. In certain embodiments, the 3′ wing segment consists of 5 linked nucleosides, wherein 4 of the 5 linked nucleosides comprise a nucleoside with a 2′-O(CH₂)₂—OCH₃ sugar. In certain embodiments, the 3′ wing segment consists of 5 linked nucleosides, wherein 3 of the 5 linked nucleosides comprise a nucleoside with a 2′-O(CH₂)₂—OCH₃ sugar. In certain embodiments, the 3′ wing segment consists of 5 linked nucleosides, wherein 2 of the 5 linked nucleosides comprises a nucleoside with a 2′-O(CH₂)₂—OCH₃ sugar. In certain embodiments, the 3′ wing segment consists of 5 linked nucleosides, wherein 1 of the 5 linked nucleosides comprises a nucleoside with a 2′-O(CH₂)₂—OCH₃ sugar.

### F2. 3′ Wing Segment w/5 Linked Nucleosides, 2′-Deoxy Combinations

[0315] In certain embodiments, the 3′ wing segment consists of 5 linked nucleosides, wherein one of the linked nucleosides comprises a nucleoside with a 2′-deoxy sugar. In certain embodiments, the 3′ wing segment consists of 5 linked nucleosides, wherein two of the linked nucleosides comprises a nucleoside with a 2′-deoxy sugar. In certain embodiments, the 3′ wing segment consists of 5 linked nucleosides, wherein one of the 5 linked nucleosides comprises a nucleoside with a 2′-deoxy sugar, and each of the other 4 linked nucleosides comprise a nucleoside with a 2′-O(CH₂)₂—OCH₃ sugar. In certain embodiments, the 3′ wing segment consists of 5 linked nucleosides, wherein one of the 5 linked nucleosides comprises a nucleoside with a 2′-deoxy sugar, one of the 5 linked nucleosides comprises a locked nucleic acid, and each of the other 3 linked nucleosides comprise a nucleoside with a 2′-O(CH₂)₂—OCH₃ sugar. In certain embodiments, the 3′ wing segment consists of 5 linked nucleosides, wherein one of the 5 linked nucleosides comprises a nucleoside with a 2′-deoxy sugar, two of the 5 linked nucleosides comprise a locked nucleic acid, and the other 2 linked nucleosides comprises a nucleoside with a 2′-O(CH₂)₂—OCH₃ sugar.

### F3. 3′ Wing Segment w/5 Linked Nucleosides, 2′-LNA Combinations

[0316] In certain embodiments, the 3′ wing segment consists of 5 linked nucleosides, wherein one of the 5 linked nucleosides comprise a locked nucleic acid. In certain embodiments, the 3′ wing segment consists of 5 linked nucleosides, wherein two of the 5 linked nucleosides comprise a locked nucleic acid. In certain embodiments, the 3′ wing segment consists of 5 linked nucleosides, wherein one of the 5 linked nucleosides comprise a 4′-CH₂—O-2′ sugar. In certain embodiments, the 3′ wing segment consists of 5 linked nucleosides, wherein two of the 5 linked nucleosides comprise a 4′-CH₂—O-2′ sugar.

[0317] In certain embodiments, the 3′ wing segment consists of 5 linked nucleosides, wherein one of the 5 linked nucleosides comprise a locked nucleic acid, and each of the other 4 linked nucleosides comprise a nucleoside with a 2′-O(CH₂)₂—OCH₃ sugar. In certain embodiments, the 3′ wing segment consists of 5 linked nucleosides, wherein two of the 5 linked nucleosides comprise a locked nucleic acid, and each of the other 3 linked nucleosides comprise a nucleoside with a 2′-O(CH₂)₂—OCH₃ sugar. In certain embodiments, the 3′ wing segment consists of 5 linked nucleosides, wherein three of the 5 linked nucleosides comprise a locked nucleic acid, and each of the other 2 linked nucleosides comprise a nucleoside with a 2′-O(CH₂)₂—OCH₃ sugar. In certain embodiments, the 3′ wing segment consists of 5 linked nucleosides, wherein one of the 5 linked nucleosides comprise a 4′-CH₂—O-2′ sugar, and each of the other 4 linked nucleosides comprise a nucleoside with a 2′-O(CH₂)₂—OCH₃ sugar. In certain embodiments, the 3′ wing segment consists of 5 linked nucleosides, wherein two of the 5 linked nucleosides comprise a 4′-CH₂—O-2′ sugar, and each of the other 3 linked nucleosides comprise a nucleoside with a 2′-O(CH₂)₂—OCH₃ sugar. In certain embodiments, the 3′ wing segment consists of 5 linked nucleosides, wherein three of the 5 linked nucleosides comprise a 4′-CH₂—O-2′ sugar, and each of the other 2 linked nucleosides comprise a nucleoside with a 2′-O(CH₂)₂—OCH₃ sugar.

[0318] In certain embodiments, the 3′ wing segment consists of 5 linked nucleosides, and the nucleosides at positions 16 and 18 of SEQ ID NO: 2 comprise a locked nucleic acid. In certain embodiments, the 3′ wing segment consists of 5 linked nucleosides, and the nucleosides at positions 16 and 18 of SEQ ID NO: 2 comprise a 4′-CH₂—O-2′ sugar.

[0319] In certain embodiments, the 3′ wing segment consists of 5 linked nucleosides, and the nucleosides at positions 16 and 18 of SEQ ID NO: 2 comprise a locked nucleic acid, and each of the other 3 linked nucleosides comprise a nucleoside with a 2′-O(CH₂)₂—OCH₃ sugar. In certain embodiments, the 3′ wing segment consists of 5 linked nucleosides, and the nucleosides at positions 16 and 18 of SEQ ID NO: 2 comprise a 4′-CH₂—O-2′ sugar, and each of the other 3 linked nucleosides comprise a nucleoside with a 2′-O(CH₂)₂—OCH₃ sugar.

[0320] In certain embodiments, the 3′ wing segment consists of 5 linked nucleosides, and the nucleosides at positions 16 and 19 of SEQ ID NO: 2 comprise a locked nucleic acid. In certain embodiments, the 3′ wing segment consists of 5 linked nucleosides, and the nucleosides at positions 16 and 19 of SEQ ID NO: 2 comprise a 4′-CH₂—O-2′ sugar.

[0321] In certain embodiments, the 3′ wing segment consists of 5 linked nucleosides, and the nucleosides at positions 16 and 19 of SEQ ID NO: 2 comprise a locked nucleic acid, and each of the other 3 linked nucleosides comprise a nucleoside with a 2′-O(CH₂)₂—OCH₃ sugar. In certain embodiments, the 3′ wing segment consists of 5 linked nucleosides, and the nucleosides at positions 16 and 19 of SEQ ID NO: 2 comprise a 4′-CH₂—O-2′ sugar, and each of the other 3 linked nucleosides comprise a nucleoside with a 2′-O(CH₂)₂—OCH₃ sugar.

[0322] In certain embodiments, the 3′ wing segment consists of 5 linked nucleosides, and the nucleosides at positions 16 and 20 of SEQ ID NO: 2 comprise a locked nucleic acid. In certain embodiments, the 3′ wing segment consists of 5 linked nucleosides, and the nucleosides at positions 16 and 20 of SEQ ID NO: 2 comprise a 4′-CH₂—O-2′ sugar.

[0323] In certain embodiments, the 3′ wing segment consists of 5 linked nucleosides, and the nucleosides at positions 16 and 20 of SEQ ID NO: 2 comprise a locked nucleic acid, and each of the other 3 linked nucleosides comprise a nucleoside with a 2′-O(CH₂)₂—OCH₃ sugar. In certain embodiments, the 3′ wing segment consists of 5 linked nucleosides, and the nucleosides at positions 16 and 20 of SEQ ID NO: 2 comprise a 4′-CH₂—O-2′ sugar, and each of the other 3 linked nucleosides comprise a nucleoside with a 2′-O(CH₂)₂—OCH₃ sugar.

[0324] In certain embodiments, the 3′ wing segment consists of 5 linked nucleosides, and the nucleosides at positions 17 and 18 of SEQ ID NO: 2 comprise a locked nucleic acid. In certain embodiments, the 3′ wing segment consists of 5 linked nucleosides, and the nucleosides at positions 17 and 18 of SEQ ID NO: 2 comprise a 4′-CH₂—O-2′ sugar.

[0325] In certain embodiments, the 3′ wing segment consists of 5 linked nucleosides, and the nucleosides at positions 17 and 18 of SEQ ID NO: 2 comprise a locked nucleic acid, and each of the other 3 linked nucleosides comprise a nucleoside with a 2′-O(CH₂)₂—OCH₃ sugar. In certain embodiments, the 3′ wing segment consists of 5 linked nucleosides, and the nucleosides at positions 17 and 18 of SEQ ID NO: 2 comprise a 4′-CH₂—O-2′ sugar, and each of the other 3 linked nucleosides comprise a nucleoside with a 2′-O(CH₂)₂—OCH₃ sugar.

[0326] In certain embodiments, the 3′ wing segment consists of 5 linked nucleosides, and the nucleosides at positions 17 and 19 of SEQ ID NO: 2 comprise a locked nucleic acid. In certain embodiments, the 3′ wing segment consists of 5 linked nucleosides, and the nucleosides at positions 17 and 19 of SEQ ID NO: 2 comprise a 4′-CH₂—O-2′ sugar.

[0327] In certain embodiments, the 3′ wing segment consists of 5 linked nucleosides, and the nucleosides at positions 17 and 19 of SEQ ID NO: 2 comprise a locked nucleic acid, and each of the other 3 linked nucleosides comprise a nucleoside with a 2′-O(CH₂)₂—OCH₃ sugar. In certain embodiments, the 3′ wing segment consists of 5 linked nucleosides, and the nucleosides at positions 17 and 19 of SEQ ID NO: 2 comprise a 4′-CH₂—O-2′ sugar, and each of the other 3 linked nucleosides comprise a nucleoside with a 2′-O(CH₂)₂—OCH₃ sugar.

[0328] In certain embodiments, the 3′ wing segment consists of 5 linked nucleosides, and the nucleosides at positions 17 and 20 of SEQ ID NO: 2 comprise a locked nucleic acid. In certain embodiments, the 3′ wing segment consists of 5 linked nucleosides, and the nucleosides at positions 17 and 20 of SEQ ID NO: 2 comprise a 4′-CH₂—O-2′ sugar.

[0329] In certain embodiments, the 3′ wing segment consists of 5 linked nucleosides, and the nucleosides at positions 17 and 20 of SEQ ID NO: 2 comprise a locked nucleic acid, and each of the other 3 linked nucleosides comprise a nucleoside with a 2′-O(CH₂)₂—OCH₃ sugar. In certain embodiments, the 3′ wing segment consists of 5 linked nucleosides, and the nucleosides at positions 17 and 20 of SEQ ID NO: 2 comprise a 4′-CH₂—O-2′ sugar, and each of the other 3 linked nucleosides comprise a nucleoside with a 2′-O(CH₂)₂—OCH₃ sugar.

[0330] In certain embodiments, the 3′ wing segment consists of 5 linked nucleosides, and the nucleosides at positions 18 and 19 of SEQ ID NO: 2 comprise a locked nucleic acid. In certain embodiments, the 3′ wing segment consists of 5 linked nucleosides, and the nucleosides at positions 18 and 19 of SEQ ID NO: 2 comprise a 4′-CH₂—O-2′ sugar.

[0331] In certain embodiments, the 3′ wing segment consists of 5 linked nucleosides, and the nucleosides at positions 18 and 19 of SEQ ID NO: 2 comprise a locked nucleic acid, and each of the other 3 linked nucleosides comprise a nucleoside with a 2′-O(CH₂)₂—OCH₃ sugar. In certain embodiments, the 3′ wing segment consists of 5 linked nucleosides, and the nucleosides at positions 18 and 19 of SEQ ID NO: 2 comprise a 4′-CH₂—O-2′ sugar, and each of the other 3 linked nucleosides comprise a nucleoside with a 2′-O(CH₂)₂—OCH₃ sugar.

[0332] In certain embodiments, the 3′ wing segment consists of 5 linked nucleosides, and the nucleosides at positions 18 and 20 of SEQ ID NO: 2 comprise a locked nucleic acid. In certain embodiments, the 3′ wing segment consists of 5 linked nucleosides, and the nucleosides at positions 18 and 20 of SEQ ID NO: 2 comprise a 4′-CH₂—O-2′ sugar.

[0333] In certain embodiments, the 3′ wing segment consists of 5 linked nucleosides, and the nucleosides at positions 18 and 20 of SEQ ID NO: 2 comprise a locked nucleic acid, and each of the other 3 linked nucleosides comprise a nucleoside with a 2′-O(CH₂)₂—OCH₃ sugar. In certain embodiments, the 3′ wing segment consists of 5 linked nucleosides, and the nucleosides at positions 18 and 20 of SEQ ID NO: 2 comprise a 4′-CH₂—O-2′ sugar, and each of the other 3 linked nucleosides comprise a nucleoside with a 2′-O(CH₂)₂—OCH₃ sugar.

[0334] In certain embodiments, the 3′ wing segment consists of 5 linked nucleosides, and the nucleosides at positions 19 and 20 of SEQ ID NO: 2 comprise a locked nucleic acid. In certain embodiments, the 3′ wing segment consists of 5 linked nucleosides, and the nucleosides at positions 19 and 20 of SEQ ID NO: 2 comprise a 4′-CH₂—O-2′ sugar.

[0335] In certain embodiments, the 3′ wing segment consists of 5 linked nucleosides, and the nucleosides at positions 19 and 20 of SEQ ID NO: 2 comprise a locked nucleic acid, and each of the other 3 linked nucleosides comprise a nucleoside with a 2′-O(CH₂)₂—OCH₃ sugar. In certain embodiments, the 3′ wing segment consists of 5 linked nucleosides, and the nucleosides at positions 19 and 20 of SEQ ID NO: 2 comprise a 4′-CH₂—O-2′ sugar, and each of the other 3 linked nucleosides comprise a nucleoside with a 2′-O(CH₂)₂—OCH₃ sugar.

[0336] In certain embodiments, the 3′ wing segment consists of 5 linked nucleosides, and the nucleosides at positions 17, 18, and 19 of SEQ ID NO: 2 comprise a locked nucleic acid. In certain embodiments, the 3′ wing segment consists of 5 linked nucleosides, and the nucleosides at positions 17, 18, and 19 of SEQ ID NO: 2 comprise a 4′-CH₂—O-2′ sugar.

[0337] In certain embodiments, the 3′ wing segment consists of 5 linked nucleosides, and the nucleosides at positions 17, 18, and 19 of SEQ ID NO: 2 comprise a locked nucleic acid, and each of the other 2 linked nucleosides comprise a nucleoside with a 2′-O(CH₂)₂—OCH₃ sugar. In certain embodiments, the 3′ wing segment consists of 5 linked nucleosides, and the nucleosides at positions 17, 18 and 19 of SEQ ID NO: 2 comprise a 4′-CH₂—O-2′ sugar, and each of the other 2 linked nucleosides comprise a nucleoside with a 2′-O(CH₂)₂—OCH₃ sugar.

[0338] In certain embodiments, the 3′ wing segment consists of 5 linked nucleosides, and the nucleosides at positions 17, 19, and 20 of SEQ ID NO: 2 comprise a locked nucleic acid. In certain embodiments, the 3′ wing segment consists of 5 linked nucleosides, and the nucleosides at positions 17, 19, and 20 of SEQ ID NO: 2 comprise a 4′-CH₂—O-2′ sugar.

[0339] In certain embodiments, the 3′ wing segment consists of 5 linked nucleosides, and the nucleosides at positions 17, 19, and 20 of SEQ ID NO: 2 comprise a locked nucleic acid, and each of the other 2 linked nucleosides comprise a nucleoside with a 2′-O(CH₂)₂—OCH₃ sugar. In certain embodiments, the 3′ wing segment consists of 5 linked nucleosides, and the nucleosides at positions 17, 19 and 20 of SEQ ID NO: 2 comprise a 4′-CH₂—O-2′ sugar, and each of the other 2 linked nucleosides comprise a nucleoside with a 2′-O(CH₂)₂—OCH₃ sugar.

### G1. 3′ Wing Segment w/6 Linked Nucleosides

[0340] In certain embodiments, the 3′ wing segment consists of 6 linked nucleosides. In certain embodiments, the 3′ wing segment consists of 6 linked nucleosides, wherein each of the 6 linked nucleosides comprise a nucleoside with a 2′-O(CH₂)₂—OCH₃ sugar. In certain embodiments, the 3′ wing segment consists of 6 linked nucleosides, wherein 5 of the 6 linked nucleosides comprise a nucleoside with a 2′-O(CH₂)₂—OCH₃ sugar. In certain embodiments, the 3′ wing segment consists of 6 linked nucleosides, wherein 4 of the 6 linked nucleosides comprise a nucleoside with a 2′-O(CH₂)₂—OCH₃ sugar. In certain embodiments, the 3′ wing segment consists of 6 linked nucleosides, wherein 3 of the 6 linked nucleosides comprise a nucleoside with a 2′-O(CH₂)₂—OCH₃ sugar. In certain embodiments, the 3′ wing segment consists of 6 linked nucleosides, wherein 2 of the 6 linked nucleosides comprises a nucleoside with a 2′-O(CH₂)₂—OCH₃ sugar. In certain embodiments, the 3′ wing segment consists of 6 linked nucleosides, wherein 1 of the 6 linked nucleosides comprises a nucleoside with a 2′-O(CH₂)₂—OCH₃ sugar.

### G2. 3′ Wing Segment w/6 Linked Nucleosides, 2′-Deoxy Combinations

[0341] In certain embodiments, the 3′ wing segment consists of 6 linked nucleosides, wherein one of the linked nucleosides comprises a nucleoside with a 2′-deoxy sugar. In certain embodiments, the 3′ wing segment consists of 6 linked nucleosides, wherein two of the linked nucleosides comprises a nucleoside with a 2′-deoxy sugar. In certain embodiments, the 3′ wing segment consists of 6 linked nucleosides, wherein one of the 6 linked nucleosides comprises a nucleoside with a 2′-deoxy sugar, and each of the other 5 linked nucleosides comprise a nucleoside with a 2′-O(CH₂)₂—OCH₃ sugar. In certain embodiments, the 3′ wing segment consists of 6 linked nucleosides, wherein one of the 6 linked nucleosides comprises a nucleoside with a 2′-deoxy sugar, one of the 6 linked nucleosides comprises a locked nucleic acid, and each of the other 4 linked nucleosides comprise a nucleoside with a 2′-O(CH₂)₂—OCH₃ sugar. In certain embodiments, the 3′ wing segment consists of 6 linked nucleosides, wherein one of the 5 linked nucleosides comprises a nucleoside with a 2′-deoxy sugar, two of the 6 linked nucleosides comprise a locked nucleic acid, and the other 3 linked nucleosides comprises a nucleoside with a 2′-O(CH₂)₂—OCH₃ sugar.

### G3. 3′ Wing Segment w/6 Linked Nucleosides, 2′-LNA Combinations

[0342] In certain embodiments, the 3′ wing segment consists of 6 linked nucleosides, wherein one of the 6 linked nucleosides comprise a locked nucleic acid. In certain embodiments, the 3′ wing segment consists of 6 linked nucleosides, wherein two of the 6 linked nucleosides comprise a locked nucleic acid. In certain embodiments, the 3′ wing segment consists of 6 linked nucleosides, wherein one of the 6 linked nucleosides comprise a 4′-CH₂—O-2′ sugar. In certain embodiments, the 3′ wing segment consists of 6 linked nucleosides, wherein two of the 6 linked nucleosides comprise a 4′-CH₂—O-2′ sugar.

[0343] In certain embodiments, the 3′ wing segment consists of 6 linked nucleosides, wherein one of the 6 linked nucleosides comprise a locked nucleic acid, and each of the other 5 linked nucleosides comprise a nucleoside with a 2′-O(CH₂)₂—OCH₃ sugar. In certain embodiments, the 3′ wing segment consists of 6 linked nucleosides, wherein two of the 6 linked nucleosides comprise a locked nucleic acid, and each of the other 4 linked nucleosides comprise a nucleoside with a 2′-O(CH₂)₂—OCH₃ sugar. In certain embodiments, the 3′ wing segment consists of 6 linked nucleosides, wherein three of the 6 linked nucleosides comprise a locked nucleic acid, and each of the other 3 linked nucleosides comprise a nucleoside with a 2′-O(CH₂)₂—OCH₃ sugar. In certain embodiments, the 3′ wing segment consists of 6 linked nucleosides, wherein one of the 6 linked nucleosides comprise a 4′-CH₂—O-2′ sugar, and each of the other 5 linked nucleosides comprise a nucleoside with a 2′-O(CH₂)₂—OCH₃ sugar. In certain embodiments, the 3′ wing segment consists of 6 linked nucleosides, wherein two of the 6 linked nucleosides comprise a 4′-CH₂—O-2′ sugar, and each of the other 4 linked nucleosides comprise a nucleoside with a 2′-O(CH₂)₂—OCH₃ sugar. In certain embodiments, the 3′ wing segment consists of 6 linked nucleosides, wherein three of the 6 linked nucleosides comprise a 4′-CH₂—O-2′ sugar, and each of the other 3 linked nucleosides comprise a nucleoside with a 2′-O(CH₂)₂—OCH₃ sugar.

[0344] In certain embodiments, the 3′ wing segment consists of 6 linked nucleosides, and the nucleosides at positions 16 and 18 of SEQ ID NO: 2 comprise a locked nucleic acid. In certain embodiments, the 3′ wing segment consists of 6 linked nucleosides, and the nucleosides at positions 16 and 18 of SEQ ID NO: 2 comprise a 4′-CH₂—O-2′ sugar.

[0345] In certain embodiments, the 3′ wing segment consists of 6 linked nucleosides, and the nucleosides at positions 16 and 18 of SEQ ID NO: 2 comprise a locked nucleic acid, and each of the other 4 linked nucleosides comprise a nucleoside with a 2′-O(CH₂)₂—OCH₃ sugar. In certain embodiments, the 3′ wing segment consists of 6 linked nucleosides, and the nucleosides at positions 16 and 18 of SEQ ID NO: 2 comprise a 4′-CH₂—O-2′ sugar, and each of the other 4 linked nucleosides comprise a nucleoside with a 2′-O(CH₂)₂—OCH₃ sugar.

[0346] In certain embodiments, the 3′ wing segment consists of 6 linked nucleosides, and the nucleosides at positions 16 and 19 of SEQ ID NO: 2 comprise a locked nucleic acid. In certain embodiments, the 3′ wing segment consists of 6 linked nucleosides, and the nucleosides at positions 16 and 19 of SEQ ID NO: 2 comprise a 4′-CH₂—O-2′ sugar.

[0347] In certain embodiments, the 3′ wing segment consists of 6 linked nucleosides, and the nucleosides at positions 16 and 19 of SEQ ID NO: 2 comprise a locked nucleic acid, and each of the other 4 linked nucleosides comprise a nucleoside with a 2′-O(CH₂)₂—OCH₃ sugar. In certain embodiments, the 3′ wing segment consists of 6 linked nucleosides, and the nucleosides at positions 16 and 19 of SEQ ID NO: 2 comprise a 4′-CH₂—O-2′ sugar, and each of the other 4 linked nucleosides comprise a nucleoside with a 2′-O(CH₂)₂—OCH₃ sugar.

[0348] In certain embodiments, the 3′ wing segment consists of 6 linked nucleosides, and the nucleosides at positions 16 and 20 of SEQ ID NO: 2 comprise a locked nucleic acid. In certain embodiments, the 3′ wing segment consists of 6 linked nucleosides, and the nucleosides at positions 16 and 20 of SEQ ID NO: 2 comprise a 4′-CH₂—O-2′ sugar.

[0349] In certain embodiments, the 3′ wing segment consists of 6 linked nucleosides, and the nucleosides at positions 16 and 20 of SEQ ID NO: 2 comprise a locked nucleic acid, and each of the other 4 linked nucleosides comprise a nucleoside with a 2′-O(CH₂)₂—OCH₃ sugar. In certain embodiments, the 3′ wing segment consists of 6 linked nucleosides, and the nucleosides at positions 16 and 20 of SEQ ID NO: 2 comprise a 4′-CH₂—O-2′ sugar, and each of the other 4 linked nucleosides comprise a nucleoside with a 2′-O(CH₂)₂—OCH₃ sugar.

[0350] In certain embodiments, the 3′ wing segment consists of 6 linked nucleosides, and the nucleosides at positions 17 and 18 of SEQ ID NO: 2 comprise a locked nucleic acid. In certain embodiments, the 3′ wing segment consists of 6 linked nucleosides, and the nucleosides at positions 17 and 18 of SEQ ID NO: 2 comprise a 4′-CH₂—O-2′ sugar.

[0351] In certain embodiments, the 3′ wing segment consists of 6 linked nucleosides, and the nucleosides at positions 17 and 18 of SEQ ID NO: 2 comprise a locked nucleic acid, and each of the other 4 linked nucleosides comprise a nucleoside with a 2′-O(CH₂)₂—OCH₃ sugar. In certain embodiments, the 3′ wing segment consists of 6 linked nucleosides, and the nucleosides at positions 17 and 18 of SEQ ID NO: 2 comprise a 4′-CH₂—O-2′ sugar, and each of the other 4 linked nucleosides comprise a nucleoside with a 2′-O(CH₂)₂—OCH₃ sugar.

[0352] In certain embodiments, the 3′ wing segment consists of 6 linked nucleosides, and the nucleosides at positions 17 and 19 of SEQ ID NO: 2 comprise a locked nucleic acid. In certain embodiments, the 3′ wing segment consists of 6 linked nucleosides, and the nucleosides at positions 17 and 19 of SEQ ID NO: 2 comprise a 4′-CH₂—O-2′ sugar.

[0353] In certain embodiments, the 3′ wing segment consists of 6 linked nucleosides, and the nucleosides at positions 17 and 19 of SEQ ID NO: 2 comprise a locked nucleic acid, and each of the other 4 linked nucleosides comprise a nucleoside with a 2′-O(CH₂)₂—OCH₃ sugar. In certain embodiments, the 3′ wing segment consists of 6 linked nucleosides, and the nucleosides at positions 17 and 19 of SEQ ID NO: 2 comprise a 4′-CH₂—O-2′ sugar, and each of the other 4 linked nucleosides comprise a nucleoside with a 2′-O(CH₂)₂—OCH₃ sugar.

[0354] In certain embodiments, the 3′ wing segment consists of 6 linked nucleosides, and the nucleosides at positions 17 and 20 of SEQ ID NO: 2 comprise a locked nucleic acid. In certain embodiments, the 3′ wing segment consists of 6 linked nucleosides, and the nucleosides at positions 17 and 20 of SEQ ID NO: 2 comprise a 4′-CH₂—O-2′ sugar.

[0355] In certain embodiments, the 3′ wing segment consists of 6 linked nucleosides, and the nucleosides at positions 17 and 20 of SEQ ID NO: 2 comprise a locked nucleic acid, and each of the other 4 linked nucleosides comprise a nucleoside with a 2′-O(CH₂)₂—OCH₃ sugar. In certain embodiments, the 3′ wing segment consists of 6 linked nucleosides, and the nucleosides at positions 17 and 20 of SEQ ID NO: 2 comprise a 4′-CH₂—O-2′ sugar, and each of the other 4 linked nucleosides comprise a nucleoside with a 2′-O(CH₂)₂—OCH₃ sugar.

[0356] In certain embodiments, the 3′ wing segment consists of 6 linked nucleosides, and the nucleosides at positions 18 and 19 of SEQ ID NO: 2 comprise a locked nucleic acid. In certain embodiments, the 3′ wing segment consists of 6 linked nucleosides, and the nucleosides at positions 18 and 19 of SEQ ID NO: 2 comprise a 4′-CH₂—O-2′ sugar.

[0357] In certain embodiments, the 3′ wing segment consists of 6 linked nucleosides, and the nucleosides at positions 18 and 19 of SEQ ID NO: 2 comprise a locked nucleic acid, and each of the other 4 linked nucleosides comprise a nucleoside with a 2′-O(CH₂)₂—OCH₃ sugar. In certain embodiments, the 3′ wing segment consists of 6 linked nucleosides, and the nucleosides at positions 18 and 19 of SEQ ID NO: 2 comprise a 4′-CH₂—O-2′ sugar, and each of the other 4 linked nucleosides comprise a nucleoside with a 2′-O(CH₂)₂—OCH₃ sugar.

[0358] In certain embodiments, the 3′ wing segment consists of 6 linked nucleosides, and the nucleosides at positions 18 and 20 of SEQ ID NO: 2 comprise a locked nucleic acid. In certain embodiments, the 3′ wing segment consists of 6 linked nucleosides, and the nucleosides at positions 18 and 20 of SEQ ID NO: 2 comprise a 4′-CH₂—O-2′ sugar.

[0359] In certain embodiments, the 3′ wing segment consists of 6 linked nucleosides, and the nucleosides at positions 18 and 20 of SEQ ID NO: 2 comprise a locked nucleic acid, and each of the other 4 linked nucleosides comprise a nucleoside with a 2′-O(CH₂)₂—OCH₃ sugar. In certain embodiments, the 3′ wing segment consists of 6 linked nucleosides, and the nucleosides at positions 18 and 20 of SEQ ID NO: 2 comprise a 4′-CH₂—O-2′ sugar, and each of the other 4 linked nucleosides comprise a nucleoside with a 2′-O(CH₂)₂—OCH₃ sugar.

[0360] In certain embodiments, the 3′ wing segment consists of 6 linked nucleosides, and the nucleosides at positions 19 and 20 of SEQ ID NO: 2 comprise a locked nucleic acid. In certain embodiments, the 3′ wing segment consists of 6 linked nucleosides, and the nucleosides at positions 19 and 20 of SEQ ID NO: 2 comprise a 4′-CH₂—O-2′ sugar.

[0361] In certain embodiments, the 3′ wing segment consists of 6 linked nucleosides, and the nucleosides at positions 19 and 20 of SEQ ID NO: 2 comprise a locked nucleic acid, and each of the other 4 linked nucleosides comprise a nucleoside with a 2′-O(CH₂)₂—OCH₃ sugar. In certain embodiments, the 3′ wing segment consists of 6 linked nucleosides, and the nucleosides at positions 19 and 20 of SEQ ID NO: 2 comprise a 4′-CH₂—O-2′ sugar, and each of the other 4 linked nucleosides comprise a nucleoside with a 2′-O(CH₂)₂—OCH₃ sugar.

[0362] In certain embodiments, the 3′ wing segment consists of 6 linked nucleosides, and the nucleosides at positions 17, 18, and 19 of SEQ ID NO: 2 comprise a locked nucleic acid. In certain embodiments, the 3′ wing segment consists of 6 linked nucleosides, and the nucleosides at positions 17, 18, and 19 of SEQ ID NO: 2 comprise a 4′-CH₂—O-2′ sugar.

[0363] In certain embodiments, the 3′ wing segment consists of 6 linked nucleosides, and the nucleosides at positions 17, 18, and 19 of SEQ ID NO: 2 comprise a locked nucleic acid, and each of the other 3 linked nucleosides comprise a nucleoside with a 2′-O(CH₂)₂—OCH₃ sugar. In certain embodiments, the 3′ wing segment consists of 6 linked nucleosides, and the nucleosides at positions 17, 18 and 19 of SEQ ID NO: 2 comprise a 4′-CH₂—O-2′ sugar, and each of the other 3 linked nucleosides comprise a nucleoside with a 2′-O(CH₂)₂—OCH₃ sugar.

[0364] In certain embodiments, the 3′ wing segment consists of 6 linked nucleosides, and the nucleosides at positions 17, 19, and 20 of SEQ ID NO: 2 comprise a locked nucleic acid. In certain embodiments, the 3′ wing segment consists of 6 linked nucleosides, and the nucleosides at positions 17, 19, and 20 of SEQ ID NO: 2 comprise a 4′-CH₂—O-2′ sugar.

[0365] In certain embodiments, the 3′ wing segment consists of 6 linked nucleosides, and the nucleosides at positions 17, 19, and 20 of SEQ ID NO: 2 comprise a locked nucleic acid, and each of the other 3 linked nucleosides comprise a nucleoside with a 2′-O(CH₂)₂—OCH₃ sugar. In certain embodiments, the 3′ wing segment consists of 6 linked nucleosides, and the nucleosides at positions 17, 19 and 20 of SEQ ID NO: 2 comprise a 4′-CH₂—O-2′ sugar, and each of the other 3 linked nucleosides comprise a nucleoside with a 2′-O(CH₂)₂—OCH₃ sugar.

### H-0. Gap Segments

[0366] In some embodiments, a modified oligonucleotide comprises or consists of at least one gap segment. In some embodiments, a modified oligonucleotide comprises or consists of at least two gap segments. In some embodiments, a modified oligonucleotide comprises 1, 2, 3, 4, 5, 6, 7, 8, or 9 or 10 gap segments. Gap segments are consecutively referred to a first, a second, a third, a fourth, a fifth, a sixth, a seventh, an eight, a ninth or a tenth gap segment, respectively, with the first gap segment being nearest to the 5′ end of the modified oligonucleotide and last gap segment being nearest to the 3′ end of the modified oligonucleotide. In some embodiments, a modified oligonucleotide comprises or consists of 2 gap segments. In some embodiments, a modified oligonucleotide comprises or consists of 3 gap segments. In some embodiments, a modified oligonucleotide comprises or consists of 4 gap segments. In some embodiments, a modified oligonucleotide comprises or consists of 5 gap segments. In some embodiments, a modified oligonucleotide comprises or consists of 6 gap segments. In some embodiments, a modified oligonucleotide comprises or consists of 7 gap segments.

[0367] In some embodiments, a gap segment comprises or consists of 1 to 20 linked nucleosides. In some embodiments, the gap segment consists of 1 nucleoside. In some embodiments, the gap segment consists of 2 linked nucleosides. In some embodiments, the gap segment consists of 23 linked nucleosides. In some embodiments, the gap segment consists of 4 linked nucleosides. In some embodiments, the gap segment consists of 5 linked nucleosides. In some embodiments, the gap segment consists of 6 linked nucleosides. In some embodiments, the gap segment consists of 7 linked nucleosides. In some embodiments, the gap segment consists of 8 linked nucleosides. In some embodiments, the gap segment consists of 9 linked nucleosides. In some embodiments, the gap segment consists of 10 linked nucleosides.

### H. First Gap Segment

[0368] In certain embodiments, the first gap segment comprises or consists of 1, 2, 3, 4, 5, 6, 7, or 8 linked nucleosides. In certain embodiments, the first gap segment comprises or consists of 4 or 5 linked nucleosides. In certain embodiments, the first gap segment comprises or consists of 4 linked nucleosides. In certain embodiments, the first gap segment comprises or consists of 5 linked nucleosides.

[0369] In certain embodiments, the first gap segment comprises or consists of 1, 2, 3, 4, 5, 6, 7, or 8 linked nucleosides, each with 2′-deoxy sugars. In certain embodiments, the first gap segment comprises or consists of 4 or 5 linked nucleosides, each with 2′-deoxy sugars. In certain embodiments, the first gap segment comprises or consists of 4 linked nucleosides, each with 2′-deoxy sugars. In certain embodiments, the first gap segment comprises or consists of 5 linked nucleosides, each with 2′-deoxy sugars.

[0370] In certain embodiments, the first gap segment, each with 2′-deoxy sugars, is positions 6, 7, 8, and 9 of SEQ ID NO: 2. In certain embodiments, the first gap segment, each with 2′-deoxy sugars, is positions 5, 6, 7, 8, and 9 of SEQ ID NO: 2. In certain embodiments, the first gap segment, each with 2′-deoxy sugars, is positions 6, 7, 8, 9, and 10 of SEQ ID NO: 2.

### I. Second Gap Segment

[0371] In certain embodiments, the second gap segment comprises or consists of 1, 2, 3, 4, 5, 6, 7, or 8 linked nucleosides. In certain embodiments, the second gap segment comprises or consists of 4 or 5 linked nucleosides. In certain embodiments, the first gap segment comprises or consists of 4 linked nucleosides. In certain embodiments, the first gap segment comprises or consists of 5 linked nucleosides.

[0372] In certain embodiments, the second gap segment comprises or consists of 1, 2, 3, 4, 5, 6, 7, or 8 linked nucleosides, each with 2′-deoxy sugars. In certain embodiments, the second gap segment comprises or consists of 4 linked nucleosides, each with 2′-deoxy sugars. In certain embodiments, the second gap segment comprises or consists of 5 linked nucleosides, each with 2′-deoxy sugars. In certain embodiments, the second gap segment comprises or consists of 6 linked nucleosides, each with 2′-deoxy sugars.

[0373] In certain embodiments, the second gap segment, each with 2′-deoxy sugars, is positions 11, 12, 13, and 14 of SEQ ID NO: 2. In certain embodiments, the second gap segment, each with 2′-deoxy sugars, is positions 11, 12, 13, 14, and 15 of SEQ ID NO: 2. In certain embodiments, the second gap segment, each with 2′-deoxy sugars, is positions 11, 12, 13, 14, 15, and 16 of SEQ ID NO: 2.

J. Separator segment

[0374] In some embodiments, the separator segment comprises 0, 1, 2, 3, 4 or 5 linked nucleosides. In some embodiments, the separator segment comprises 1 nucleoside. In some embodiments, the nucleoside comprises a modification. Exemplary modifications of the nucleoside include but are not limited to a 2′methoxyethyl nucleoside, a 2′-O-methyl nucleoside, a 2′OH nucleoside, a 2′ fluoro 2′-deoxy nucleoside, a 2′-F-arabinonucleic acid (2′-F-ANA), a glycol nucleic acid (GNA) or a locked nucleic acid (LNA).

[0375] In certain embodiments, the separator segment consists of one nucleoside comprising a 2′—OCH₃ sugar. In certain embodiments, the separator segment consists of one nucleoside comprising a 2′-O(CH₂)₂—OCH₃ sugar.

[0376] In certain embodiments, the separator segment is at position 7 or 8 or 9 or 10 or 11 or 12 or 13 or 14 of SEQ ID NO: 2. In certain embodiments, the separator segment is at position 9 or 10 or 11 of SEQ ID NO: 2. In certain embodiments, the separator segment is at position 10 of SEQ ID NO: 2.

[0377] In certain embodiments, the separator segment is at position 10 of SEQ ID NO: 2 and consists of one nucleoside comprising a 2′-O(CH₂)₂—OCH₃ sugar. In certain embodiments, the separator segment consists of one nucleoside comprising a 2′—OCH₃ sugar. In certain embodiments, the separator segment is at position 7 or 8 or 9 or 10 or 11 or 12 or 13 or 14 of SEQ ID NO: 2. In certain embodiments, the separator segment is at position 9 or 10 or 11 of SEQ ID NO: 2. In certain embodiments, the separator segment is at position 10 of SEQ ID NO: 2.

[0378] In certain embodiments, the separator segment consists of one nucleoside comprising a 2′-O(CH₂)₂—OCH₃ sugar. In certain embodiments, the separator segment consists of one nucleoside comprising a 2′—OCH₃ sugar. In certain embodiments, the separator segment is at position 7 or 8 or 9 or 10 or 11 or 12 or 13 or 14 of SEQ ID NO: 2. In certain embodiments, the separator segment is at position 9 or 10 or 11 of SEQ ID NO: 2. In certain embodiments, the separator segment is at position 10 of SEQ ID NO: 2.

### K. Oligonucleotide Backbone

[0379] In certain embodiments, the modified oligonucleotide is a single-stranded modified oligonucleotide. In certain embodiments, at least one internucleoside linkage is a modified internucleoside linkage. In certain embodiments, each internucleoside linkage is a phosphorothioate internucleoside linkage.

### L. Modified Nucleobases

[0380] In certain embodiments, the modified oligonucleotide comprises at least one modified nucleobase. In certain embodiments, wherein the modified oligonucleotide comprises one, two, or three modified nucleobase(s). In certain embodiments, the modified nucleobase is a 5-methylcytosine. In certain embodiments, the cytosines at positions 2, 13, and 20 of SEQ ID NO: 2 are each 5-methylcytosine.

### M1. 5-4-1-5-5 Modified Oligonucleotides

[0381] In certain embodiments, the modified oligonucleotide comprises: a 5′ wing segment consisting of 5 linked nucleosides; a first gap segment consisting of 4 linked nucleosides with 2′-deoxy sugars; a separator segment at position 10 of SEQ ID NO:2; a second gap segment consisting of 5 linked nucleosides with 2′-deoxy sugars; and a 3′ wing segment consisting of 5 linked nucleosides. In an exemplary embodiment, the modified oligonucleotide of this paragraph further comprises that the cytosines at positions 2, 13, and 20 of SEQ ID NO: 2 are each 5-methylcytosine. In an exemplary embodiment, the modified oligonucleotide of this paragraph further comprises internucleoside linkages in which each is a phosphorothioate internucleoside linkage. In an exemplary embodiment, the modified oligonucleotide of this paragraph further comprises that a cytosine at positions 2, 13, and 20 of SEQ ID NO: 2 are each 5-methylcytosine and further comprises internucleoside linkages in which each is a phosphorothioate internucleoside linkage.

[0382] In certain embodiments, the modified oligonucleotide comprises: a 5′ wing segment described in Section C1, C2, or C3; a first gap segment consisting of 4 linked nucleosides with 2′-deoxy sugars; a separator segment at position 10 of SEQ ID NO: 2; a second gap segment consisting of 5 linked nucleosides with 2′-deoxy sugars; and a 3′ wing segment described in Section F1, F2, or F3. In an exemplary embodiment, the modified oligonucleotide of this paragraph further comprises that the cytosines at positions 2, 13, and 20 of SEQ ID NO: 2 are each 5-methylcytosine. In an exemplary embodiment, the modified oligonucleotide of this paragraph further comprises internucleoside linkages in which each is a phosphorothioate internucleoside linkage. In an exemplary embodiment, the modified oligonucleotide of this paragraph further comprises a cytosine at positions 2, 13, and 20 of SEQ ID NO: 2 are each 5-methylcytosine and further comprises internucleoside linkages in which each is a phosphorothioate internucleoside linkage.

[0383] In certain embodiments, the modified oligonucleotide comprises a sequence which is A, B, C, D, E, F, G, H, I, J, K, L, M, N, O, P, Q, R, S, T, U, V, W, X, Y, or Z.

### M2. 4-5-1-5-5 Modified Oligonucleotides

[0384] In certain embodiments, the modified oligonucleotide comprises: a 5′ wing segment consisting of 4 linked nucleosides; a first gap segment consisting of 5 linked nucleosides with 2′-deoxy sugars; a separator segment at position 10 of SEQ ID NO:2; a second gap segment consisting of 5 linked nucleosides with 2′-deoxy sugars; and a 3′ wing segment consisting of 5 linked nucleosides. In an exemplary embodiment, the modified oligonucleotide of this paragraph further comprises that the cytosines at positions 2, 13, and 20 of SEQ ID NO: 2 are each 5-methylcytosine. In an exemplary embodiment, the modified oligonucleotide of this paragraph further comprises internucleoside linkages in which each is a phosphorothioate internucleoside linkage. In an exemplary embodiment, the modified oligonucleotide of this paragraph further comprises that a cytosine at positions 2, 13, and 20 of SEQ ID NO: 2 are each 5-methylcytosine and further comprises internucleoside linkages in which each is a phosphorothioate internucleoside linkage.

[0385] In certain embodiments, the modified oligonucleotide comprises: a 5′ wing segment described in Section B1, B2, or B3; a first gap segment consisting of 5 linked nucleosides with 2′-deoxy sugars; a separator segment at position 10 of SEQ ID NO:2; a second gap segment consisting of 5 linked nucleosides with 2′-deoxy sugars; and a 3′ wing segment described in Section F1, F2, or F3. In an exemplary embodiment, the modified oligonucleotide of this paragraph further comprises that the cytosines at positions 2, 13, and 20 of SEQ ID NO: 2 are each 5-methylcytosine. In an exemplary embodiment, the modified oligonucleotide of this paragraph further comprises internucleoside linkages in which each is a phosphorothioate internucleoside linkage. In an exemplary embodiment, the modified oligonucleotide of this paragraph further comprises a cytosine at positions 2, 13, and 20 of SEQ ID NO: 2 are each 5-methylcytosine and further comprises internucleoside linkages in which each is a phosphorothioate internucleoside linkage.

[0386] In certain embodiments, the modified oligonucleotide comprises a sequence which is AA, AB, AC, AD, AE, AF, AG, AH, AI, AJ, AK, AL, AM, AN, or AO.

[0387] Exemplary annotations of the positions and segments of AO (AUS 1493 or SEQ ID NO: 456) is shown below.

| | | 5′ Wing | | | | First Gap | | | | | Separator | | | | | | | | | | |
|---|---|---|---|---|---|---|---|---|---|---|---|---|---|---|---|---|---|---|---|---|---|
| | | segment | | | | segment | | | | | segment | Second Gap segment | | | | | 3′ Wing segment | | | | |
| Position | | 1 | 2 | 3 | 4 | 5 | 6 | 7 | 8 | 9 | 10 | 11 | 12 | 13 | 14 | 15 | 16 | 17 | 18 | 19 | 20 |
| SEQ ID | AUS # | | | | | | | | | | | | | | | | | | | | |
| NO | | | | | | | | | | | | | | | | | | | | | |
| 456 | AUS1493 | G | C | A | G | a | g | g | t | g | A | a | g | c | g | a | A | +G | T | +G | +C |

### M3. 5-4-1-6-4 Modified Oligonucleotides

[0388] In certain embodiments, the modified oligonucleotide comprises: a 5′ wing segment consisting of 5 linked nucleosides; a first gap segment consisting of 4 linked nucleosides with 2′-deoxy sugars; a separator segment at position 10 of SEQ ID NO:2; a second gap segment consisting of 6 linked nucleosides with 2′-deoxy sugars; and a 3′ wing segment consisting of 4 linked nucleosides. In an exemplary embodiment, the modified oligonucleotide of this paragraph further comprises that the cytosines at positions 2, 13, and 20 of SEQ ID NO: 2 are each 5-methylcytosine. In an exemplary embodiment, the modified oligonucleotide of this paragraph further comprises internucleoside linkages in which each is a phosphorothioate internucleoside linkage. In an exemplary embodiment, the modified oligonucleotide of this paragraph further comprises that a cytosine at positions 2, 13, and 20 of SEQ ID NO: 2 are each 5-methylcytosine and further comprises internucleoside linkages in which each is a phosphorothioate internucleoside linkage.

[0389] In certain embodiments, the modified oligonucleotide comprises: a 5′ wing segment described in Section C1, C2, or C3; a first gap segment consisting of 4 linked nucleosides with 2′-deoxy sugars; a separator segment at position 10 of SEQ ID NO:2; a second gap segment consisting of 6 linked nucleosides with 2′-deoxy sugars; and a 3′ wing segment described in Section E1, E2, or E3. In an exemplary embodiment, the modified oligonucleotide of this paragraph further comprises that the cytosines at positions 2, 13, and 20 of SEQ ID NO: 2 are each 5-methylcytosine. In an exemplary embodiment, the modified oligonucleotide of this paragraph further comprises internucleoside linkages in which each is a phosphorothioate internucleoside linkage. In an exemplary embodiment, the modified oligonucleotide of this paragraph further comprises a cytosine at positions 2, 13, and 20 of SEQ ID NO: 2 are each 5-methylcytosine and further comprises internucleoside linkages in which each is a phosphorothioate internucleoside linkage.

[0390] In certain embodiments, the modified oligonucleotide comprises a sequence which is AP, AQ, AR, or AS.

### M4. 4-5-1-4-6 Modified Oligonucleotides

[0391] In certain embodiments, the modified oligonucleotide comprises: a 5′ wing segment consisting of 4 linked nucleosides; a first gap segment consisting of 5 linked nucleosides with 2′-deoxy sugars; a separator segment at position 10 of SEQ ID NO:2; a second gap segment consisting of 4 linked nucleosides with 2′-deoxy sugars; and a 3′ wing segment consisting of 6 linked nucleosides. In an exemplary embodiment, the modified oligonucleotide of this paragraph further comprises that the cytosines at positions 2, 13, and 20 of SEQ ID NO: 2 are each 5-methylcytosine. In an exemplary embodiment, the modified oligonucleotide of this paragraph further comprises internucleoside linkages in which each is a phosphorothioate internucleoside linkage. In an exemplary embodiment, the modified oligonucleotide of this paragraph further comprises that a cytosine at positions 2, 13, and 20 of SEQ ID NO: 2 are each 5-methylcytosine and further comprises internucleoside linkages in which each is a phosphorothioate internucleoside linkage.

[0392] In certain embodiments, the modified oligonucleotide comprises: a 5′ wing segment described in Section B1, B2, or B3; a first gap segment consisting of 5 linked nucleosides with 2′-deoxy sugars; a separator segment at position 10 of SEQ ID NO:2; a second gap segment consisting of 4 linked nucleosides with 2′-deoxy sugars; and a 3′ wing segment described in Section G1, G2, or G3. In an exemplary embodiment, the modified oligonucleotide of this paragraph further comprises that the cytosines at positions 2, 13, and 20 of SEQ ID NO: 2 are each 5-methylcytosine. In an exemplary embodiment, the modified oligonucleotide of this paragraph further comprises internucleoside linkages in which each is a phosphorothioate internucleoside linkage. In an exemplary embodiment, the modified oligonucleotide of this paragraph further comprises a cytosine at positions 2, 13, and 20 of SEQ ID NO: 2 are each 5-methylcytosine and further comprises internucleoside linkages in which each is a phosphorothioate internucleoside linkage.

[0393] In certain embodiments, the modified oligonucleotide comprises a sequence which is AT or AU.

### M5. 5-4-1-4-6 Modified Oligonucleotides

[0394] In certain embodiments, the modified oligonucleotide comprises: a 5′ wing segment consisting of 5 linked nucleosides; a first gap segment consisting of 4 linked nucleosides with 2′-deoxy sugars; a separator segment at position 10 of SEQ ID NO:2; a second gap segment consisting of 4 linked nucleosides with 2′-deoxy sugars; and a 3′ wing segment consisting of 6 linked nucleosides. In an exemplary embodiment, the modified oligonucleotide of this paragraph further comprises that the cytosines at positions 2, 13, and 20 of SEQ ID NO: 2 are each 5-methylcytosine. In an exemplary embodiment, the modified oligonucleotide of this paragraph further comprises internucleoside linkages in which each is a phosphorothioate internucleoside linkage. In an exemplary embodiment, the modified oligonucleotide of this paragraph further comprises that a cytosine at positions 2, 13, and 20 of SEQ ID NO: 2 are each 5-methylcytosine and further comprises internucleoside linkages in which each is a phosphorothioate internucleoside linkage.

[0395] In certain embodiments, the modified oligonucleotide comprises: a 5′ wing segment described in Section C1, C2, or C3; a first gap segment consisting of 4 linked nucleosides with 2′-deoxy sugars; a separator segment at position 10 of SEQ ID NO:2; a second gap segment consisting of 4 linked nucleosides with 2′-deoxy sugars; and a 3′ wing segment described in Section G1, G2, or G3. In an exemplary embodiment, the modified oligonucleotide of this paragraph further comprises that the cytosines at positions 2, 13, and 20 of SEQ ID NO: 2 are each 5-methylcytosine. In an exemplary embodiment, the modified oligonucleotide of this paragraph further comprises internucleoside linkages in which each is a phosphorothioate internucleoside linkage. In an exemplary embodiment, the modified oligonucleotide of this paragraph further comprises a cytosine at positions 2, 13, and 20 of SEQ ID NO: 2 are each 5-methylcytosine and further comprises internucleoside linkages in which each is a phosphorothioate internucleoside linkage.

[0396] In certain embodiments, the modified oligonucleotide comprises a sequence which is AV or AW.

### M6. 4-5-1-6-4 Modified Oligonucleotides

[0397] In certain embodiments, the modified oligonucleotide comprises: a 5′ wing segment consisting of 4 linked nucleosides; a first gap segment consisting of 5 linked nucleosides with 2′-deoxy sugars; a separator segment at position 10 of SEQ ID NO:2; a second gap segment consisting of 6 linked nucleosides with 2′-deoxy sugars; and a 3′ wing segment consisting of 4 linked nucleosides. In an exemplary embodiment, the modified oligonucleotide of this paragraph further comprises that the cytosines at positions 2, 13, and 20 of SEQ ID NO: 2 are each 5-methylcytosine. In an exemplary embodiment, the modified oligonucleotide of this paragraph further comprises internucleoside linkages in which each is a phosphorothioate internucleoside linkage. In an exemplary embodiment, the modified oligonucleotide of this paragraph further comprises that a cytosine at positions 2, 13, and 20 of SEQ ID NO: 2 are each 5-methylcytosine and further comprises internucleoside linkages in which each is a phosphorothioate internucleoside linkage.

[0398] In certain embodiments, the modified oligonucleotide comprises: a 5′ wing segment described in Section B1, B2, or B3; a first gap segment consisting of 5 linked nucleosides with 2′-deoxy sugars; a separator segment at position 10 of SEQ ID NO:2; a second gap segment consisting of 6 linked nucleosides with 2′-deoxy sugars; and a 3′ wing segment described in Section E1, E2, or E3. In an exemplary embodiment, the modified oligonucleotide of this paragraph further comprises that the cytosines at positions 2, 13, and 20 of SEQ ID NO: 2 are each 5-methylcytosine. In an exemplary embodiment, the modified oligonucleotide of this paragraph further comprises internucleoside linkages in which each is a phosphorothioate internucleoside linkage. In an exemplary embodiment, the modified oligonucleotide of this paragraph further comprises a cytosine at positions 2, 13, and 20 of SEQ ID NO: 2 are each 5-methylcytosine and further comprises internucleoside linkages in which each is a phosphorothioate internucleoside linkage.

[0399] In certain embodiments, the modified oligonucleotide comprises a sequence which is AX.

[0400] In certain embodiments, one or more modified nucleosides in the wing segment have a modified sugar. In certain embodiments, the modified sugar is a bicyclic sugar. In certain embodiments, the modified nucleoside is an LNA nucleoside. In certain embodiments, the modified nucleoside is a 2′-substituted nucleoside. In certain embodiments, 2′ substituted nucleosides include nucleosides with bicyclic sugar modifications. In certain embodiments, the modified nucleoside is a 2′-MOE nucleoside. In certain embodiments, the modified nucleoside is a constrained ethyl (cEt) nucleoside. In certain embodiments, each modified nucleoside in each wing segment is independently a 2′-MOE nucleoside or a nucleoside with a bicyclic sugar modification such as a constrained ethyl (cEt) nucleoside or LNA nucleoside.

[0401] In certain embodiments, the compounds or compositions comprise a salt of the modified oligonucleotide.

[0402] In certain embodiments, the compounds or compositions further comprise a pharmaceutically acceptable carrier or diluent.

[0403] In certain embodiments, the nucleobase sequence of the modified oligonucleotide is at least 60%, 65%, 70%, 75%, 80%, 85%, 90%, 95% or 100% complementary to a HBV nucleic acid, as measured over the entirety of the modified oligonucleotide. In certain embodiments, the nucleobase sequence of the modified oligonucleotide is at least 60%, 65%, 70%, 75%, 80%, 85%, 90%, 95% or 100% complementary to SEQ ID NO: 1, as measured over the entirety of the modified oligonucleotide.

[0404] In certain embodiments, the compound or modified oligonucleotide is single-stranded.

[0405] In certain embodiments, at least one nucleoside of the modified oligonucleotide comprises a modified sugar. In certain embodiments, at least one modified sugar comprises a 2′-O-methoxyethyl group (2′-O(CH₂)₂—OCH₃). In certain embodiments, the modified sugar comprises a 2′-O—CH₃ group.

[0406] In certain embodiments, at least one modified sugar is a bicyclic sugar. In certain embodiments, at least one modified sugar the bicyclic sugar comprises a 4′-(CH₂)—O-2′ bridge, wherein n is 1 or 2. In certain embodiments, the bicyclic sugar comprises a 4′-CH₂—O-2′ bridge. In certain embodiments, the bicyclic sugar comprises a 4′-CH(CH₃)—O-2′ bridge.

### Methods

[0407] The disclosure provides methods of treating a subject with an HBV infection, or with an HBV-related disease, disorder, or condition, the methods comprising administering a therapeutically effective amount of the modified oligonucleotides described herein, or a pharmaceutical composition comprising same. In certain embodiments, the modified oligonucleotide comprises a sequence of any one of SEQ ID NOS: 11-666, or a modified oligonucleotide comprising 1, 2, 3, 4, or 5 modifications thereto.

[0408] In certain embodiments, the modified oligonucleotides or pharmaceutical compositions comprising same inhibit HBV mRNA expression in the subject. In certain embodiments, the modified oligonucleotides or pharmaceutical compositions comprising same inhibit HBV DNA levels in the subject. In certain embodiments, the modified oligonucleotides or pharmaceutical compositions comprising same inhibit HBV protein levels and/or antigen levels in the subject. The modified oligonucleotides of the disclosure, when administered to a subject, can reduce the levels of HBV mRNA, DNA, or protein, including HBV antigens such as, but not limited to HBsAg and HbeAg.

[0409] The disclosure provides methods for treating a HBV-related disease, disorder, and/or condition in an subject, the methods comprising administering a therapeutically effective amount of any pharmaceutical composition as described above to a subject in need thereof, so as to treat the HBV-related diseases, disorders, and condition. In certain embodiments, the subject is a mammal. In certain embodiments, the subject is a human and the HBV-related disease, disorder, and condition is a hepatitis B virus infection from a human hepatitis B virus. More particularly, the human hepatitis B virus may be any of the human geographical genotypes: A (Northwest Europe, North America, Central America); B (Indonesia, China, Vietnam); C (East Asia, Korea, China, Japan, Polynesia, Vietnam); D (Mediterranean area, Middle East, India); E (Africa); F (Native Americans, Polynesia); G (United States, France); or H (Central America).

[0410] In certain embodiments, the modified oligonucleotides target a region of a HBV nucleic acid. In certain embodiments, such modified oligonucleotides targeted to a region of a HBV nucleic acid have a contiguous nucleobase portion that is complementary to an equal length nucleobase portion of the region of the HBV nucleic acid. For example, the portion can be at least an 8, 9, 10, 11, 12, 13, 14, 15, 16, 17, 18, 19 or 20 contiguous nucleobases portion complementary to an equal length portion of a region recited herein.

[0411] Certain embodiments provide methods of treating a HBV related disease, disorder, or condition in a subject, comprising administering to the subject in need thereof a modified oligonucleotide, for example a modified oligonucleotide comprising any one of SEQ ID NOS: 11-666, or a modified oligonucleotide comprising 1, 2, 3, 4, or 5 modifications thereto, or pharmaceutical composition described herein.

[0412] Certain embodiments provide a method of reducing HBV expression in a subject comprising administering to the subject a modified oligonucleotide, for example a modified oligonucleotide comprising any one of SEQ ID NOS: 11-666, or a modified oligonucleotide comprising 1, 2, 3, 4, or 5 modifications thereto, or a pharmaceutical composition described herein.

[0413] Certain embodiments provide a method of preventing, ameliorating or treating an HBV-related disease, disorder or condition in a subject comprising administering to the animal a modified oligonucleotide, for example a modified oligonucleotide comprising any one of SEQ ID NOS: 11-666, or a modified oligonucleotide comprising 1, 2, 3, 4, or 5 modifications thereto, or a pharmaceutical composition described herein.

[0414] Examples of HBV-related diseases, disorders or conditions include, but are not limited to, chronic HBV infection, jaundice, liver cancer, liver inflammation, liver fibrosis, liver cirrhosis, liver failure, diffuse hepatocellular inflammatory disease, hemophagocytic syndrome, serum hepatitis, and HBV viremia. HBV-related conditions or disorders can have symptoms which may include any or all of the following: flu-like illness, weakness, aches, headache, fever, loss of appetite, diarrhea, nausea and vomiting, pain over the liver area of the body, clay- or grey-colored stool, itching all over, and dark-colored urine, which when coupled with a positive test for presence of a hepatitis B virus, a hepatitis B viral antigen, or a positive test for the presence of an antibody specific for a hepatitis B viral antigen indicate an HBV-related condition or disorder.

[0415] Certain embodiments provide a method of reducing HBV mRNA expression in a subject comprising administering to the subject a modified oligonucleotide, for example a modified oligonucleotide comprising any one of SEQ ID NOS: 11-666, or a modified oligonucleotide comprising 1, 2, 3, 4, or 5 modifications thereto, or pharmaceutical composition described herein. In certain embodiments, reduction of HBV mRNA expression in the subject prevents, ameliorates or treats an HBV-related disease, disorder or condition. In certain embodiments, reduction of HBV mRNA expression in the subject ameliorates or treats HBV infection. In certain embodiments, reduction of HBV mRNA expression in the subject prevents, ameliorates or treats liver disease. In certain embodiments, the HBV mRNA expression is reduced by at least 5%, 10%, 20%, 30%, 35%, 40%, 45%, 50%, 55%, 60%, 65%, 70%, 75%, 80%, 85%, 90%, 95% or 100%.

[0416] Certain embodiments provide a method of reducing HBV protein levels in an subject comprising administering to the subject a modified oligonucleotide, for example a modified oligonucleotide comprising any one of SEQ ID NOS: 11-666, or a modified oligonucleotide comprising 1, 2, 3, 4, or 5 modifications thereto, or a pharmaceutical composition described herein. In certain embodiments, reduction of HBV protein levels in the subject prevents, ameliorates or treats an HBV-related disease, disorder or condition. In certain embodiments, reduction of HBV protein levels in an subject ameliorates or treats HBV infection. In certain embodiments, reduction of HBV protein levels in the subject prevents, ameliorates or treats liver disease. In certain embodiments, the HBV protein level is reduced by at least 5%, 10%, 20%, 30%, 35%, 40%, 45%, 50%, 55%, 60%, 65%, 70%, 75%, 80%, 85%, 90%, 95% or 100%.

[0417] Certain embodiments provide a method of reducing HBV DNA levels in a subject comprising administering to the subject a modified oligonucleotide, for example a modified oligonucleotide comprising any one of SEQ ID NOS: 11-666, or a modified oligonucleotide comprising 1, 2, 3, 4, or 5 modifications thereto, or a pharmaceutical composition described herein. In certain embodiments, reduction of HBV DNA levels in the subject prevents, ameliorates or treats an HBV-related disease, disorder or condition. In certain embodiments, the subject may be a mammal such as a human, and the hepatitis B virus may be a human hepatitis B virus. More particularly, the human hepatitis B virus may be any of the human geographical genotypes: A (Northwest Europe, North America, Central America); B (Indonesia, China, Vietnam); C (East Asia, Korea, China, Japan, Polynesia, Vietnam); D (Mediterranean area, Middle East, India); E (Africa); F (Native Americans, Polynesia); G (United States, France); or H (Central America). In certain embodiments, reduction of HBV DNA levels in a subject ameliorates or treats HBV infection. In certain embodiments, reduction of HBV DNA levels in a subject prevents, ameliorates or treats liver disease. In certain embodiments, the HBV DNA level is reduced by at least 5%, 10%, 20%, 30%, 35%, 40%, 45%, 50%, 55%, 60%, 65%, 70%, 75%, 80%, 85%, 90%, 95% or 100%.

[0418] Certain embodiments provide a method of reducing HBV antigen levels in a subject comprising administering to the subject a modified oligonucleotide, for example a modified oligonucleotide comprising any one of SEQ ID NOS: 11-666, or a modified oligonucleotide comprising 1, 2, 3, 4, or 5 modifications thereto, or a pharmaceutical composition described herein. In certain embodiments, the antigen is HBsAg or HBeAG. In certain embodiments, reduction of HBV antigen levels in the subject prevents, ameliorates or treats an HBV-related disease, disorder or condition. In certain embodiments, reduction of HBV antigen levels in the subject prevents, ameliorates or treats liver disease. In certain embodiments, the HBV antigen levels are reduced by at least 5%, 10%, 20%, 30%, 35%, 40%, 45%, 50%, 55%, 60%, 65%, 70%, 75%, 80%, 85%, 90%, 95% or 100%.

[0419] Certain embodiments provide a method of reducing HBV DNA and HBV antigen in a subject infected with a hepatitis B virus, comprising administering to the subject a modified oligonucleotide, for example a modified oligonucleotide comprising any one of SEQ ID NOS: 11-666, or a modified oligonucleotide comprising 1, 2, 3, 4, or 5 modifications thereto, or a pharmaceutical composition described herein. In certain embodiments, the antigen is HBsAg or HBeAg. In certain embodiments, the amount of HBV antigen may be sufficiently reduced to result in seroconversion, defined as serum HBeAg absence plus serum HBeAb presence if monitoring HBeAg as the determinant for seroconversion, or defined as serum HBsAg absence if monitoring HBsAg as the determinant for seroconversion, as determined by currently available detection limits of commercial ELISA systems.

[0420] Certain embodiments provide a method for treating a subject with a HBV related disease, disorder or condition comprising: a) identifying said subject with the HBV related disease, disorder or condition, and b) administering to said subject a therapeutically effective amount of a modified oligonucleotide or pharmaceutical composition described herein. In certain embodiments, the therapeutically effective amount of the modified oligonucleotide or pharmaceutical composition administered to the subject treats or reduces the HBV related disease, disorder or condition, or a symptom thereof, in the subject. In certain embodiments, the HBV related disease, disorder or condition is a liver disease. In certain embodiments, the related disease, disorder or condition is chronic HBV infection, jaundice, liver cancer such as hepatocellular carcinoma, liver inflammation, liver fibrosis, liver cirrhosis, liver failure, diffuse hepatocellular inflammatory disease, hemophagocytic syndrome, serum hepatitis, HBV viremia, liver disease-related to transplantation, or any combination thereof.

[0421] Certain embodiments provide a method for treating a subject with a HBV related disease, disorder or condition comprising: a) identifying said subject with the HBV related disease, disorder or condition, and b) administering to said subject a therapeutically effective amount of a modified oligonucleotide or pharmaceutical composition described herein. In certain embodiments, the therapeutically effective amount of the modified oligonucleotide or pharmaceutical composition administered to the subject treats or reduces the HBV related disease, disorder or condition, or a symptom thereof, in the subject. In certain embodiments, the HBV related disease, disorder or condition is a liver disease. In certain embodiments, the related disease, disorder or condition is chronic HBV infection, jaundice, liver cancer, liver inflammation, liver fibrosis, liver cirrhosis, liver failure, diffuse hepatocellular inflammatory disease, hemophagocytic syndrome, serum hepatitis, HBV viremia, or liver disease-related to transplantation.

[0422] In certain embodiments, HBV has the sequence as set forth in GenBank Accession Numbers U95551.1 (SEQ ID NO: 3) or any variant or fragment thereof. In certain embodiments, HBV has the sequence set forth in SEQ ID NOS: 667-674.

[0423] In certain embodiments, the subject is a human.

[0424] In certain embodiments, the subject is a monkey, for example a cynomolgus monkey.

[0425] In certain embodiments, the subject is a rodent, such as a mouse or rat.

[0426] In certain embodiments, the modified oligonucleotides or pharmaceutical compositions are designated as a first agent. In certain embodiments, the methods comprise administering a first agent and one or more second agents. In certain embodiments, the first agent and one or more second agents are co-administered. In certain embodiments the first agent and one or more second agents are co-administered sequentially or concomitantly. In certain embodiments, the first agent and one or more second agents are not co-administered.

[0427] In certain embodiments, the one or more second agents are also a compound or composition described herein. In certain embodiments, the one or more second agents are different from a compound or composition described herein. Examples of one or more second agents include, but are not limited to, an anti-inflammatory agent, chemotherapeutic agent or anti-infection agent. In specific embodiments, the disease comprises liver cancer, and the one or more second agents comprises a chemotherapeutic agent, such as Gemcitabine (Gemzar), Oxaliplatin (Eloxatin), Cisplatin, Doxorubicin, 5-Fluorouracil, Capecitabine (Xeloda), or Mitoxantrone (Novantrone). In specific embodiments, the disease comprises liver disease, and the one or more second agents comprise corticosteroids, diuretics, beta-blockers, or a combination thereof.

[0428] Modified oligonucleotides of the disclosure, and pharmaceutical compositions comprising same, can be administered to the subject by any suitable route of administration. Examples of routes of administration include parenteral, e.g., intravenous, intradermal, subcutaneous, oral (e.g., inhalation), transdermal (topical), intraperitoneal (into the body cavity) and transmucosal administration.

[0429] In certain embodiments, administration comprises parenteral administration. In certain embodiments, administration comprises subcutaneous administration. In certain embodiments, administration comprises intravenous injection or infusion.

[0430] Certain embodiments provide a method for reducing an amount of HBV mRNA, DNA, protein and/or an amount of HBV antigen in a subject infected with a hepatitis B virus, the method comprising administering a therapeutically effective amount of a pharmaceutical composition as described above to the subject in need thereof so as to reduce the hepatitis B virus infection and the hepatitis B antigen, compared to the amount of HBV mRNA, protein and an amount of HBV antigen in the subject before treatment. In some embodiments, the subject may be human, and the hepatitis B virus may be a human hepatitis B virus. More particularly, the human hepatitis B virus may be any of the human geographical genotypes: A (Northwest Europe, North America, Central America); B (Indonesia, China, Vietnam); C (East Asia, Korea, China, Japan, Polynesia, Vietnam); D (Mediterranean area, Middle East, India); E (Africa); F (Native Americans, Polynesia); G (United States, France); or H (Central America).

[0431] The disclosure provides methods for reducing an amount of HBV mRNA, DNA, protein and/or an amount of HBV antigen, or a combination thereof, in a subject infected with a hepatitis B virus, the method comprising administering a therapeutically effective amount of a modified oligonucleotide or pharmaceutical composition comprising same as described above to the subject so as to reduce the hepatitis B virus infection and the hepatitis B antigen, compared to the amount of HBV mRNA, protein and/or an amount of HBV antigen in the subject before treatment. In certain embodiments, the amount of mRNA is reduced at least 10%, at least 20%, at least 30%, at least 40%, at least 50%, at least 60%, at least 70%, at least 80%, at least 90%, at least 95%, or at least 99% compared to the amount before administration of the modified antisense oligonucleotide or pharmaceutical composition. In certain embodiments, the amount of mRNA is reduced at least 50% compared to the amount before administration of the modified antisense oligonucleotide or pharmaceutical composition. In certain embodiments, the amount of mRNA is reduced at least 60% compared to the amount before administration of the modified antisense oligonucleotide or pharmaceutical composition. In certain embodiments, the amount of mRNA is reduced at least 70% compared to the amount before administration of the modified antisense oligonucleotide or pharmaceutical composition. In certain embodiments, the amount of mRNA is reduced at least 80% compared to the amount before administration of the modified antisense oligonucleotide or pharmaceutical composition. In certain embodiments, the amount of mRNA is reduced at least 90% compared to the amount before administration of the modified antisense oligonucleotide or pharmaceutical composition.

[0432] The disclosure provides methods for reducing an amount of HBV mRNA, DNA, protein and/or an amount of HBV antigen in a subject infected with a hepatitis B virus, the method comprising administering a therapeutically effective amount of a modified oligonucleotide or pharmaceutical composition as described above to the subject so as to reduce the hepatitis B virus infection and the hepatitis B antigen, compared to the amount of HBV virus, mRNA, DNA, protein and/or an amount of HBV antigen in the subject before treatment, wherein the amount of mRNA is reduced at least 75% compared to the amount before administration of the modified oligonucleotide or pharmaceutical composition. In certain embodiments, the methods reduce an amount of HBV virus, mRNA, DNA, protein and/or an amount of HBV antigen in a subject infected with a hepatitis B virus, the method comprising administering a therapeutically effective amount of a modified oligonucleotide or pharmaceutical composition as described above to the subject so as to reduce the hepatitis B virus infection and the hepatitis B antigen, compared to the amount of hepatitis B virus and HBV antigen in the subject before treatment, wherein the amount of mRNA is reduced at least 80% compared to the amount before administration of the modified oligonucleotide or pharmaceutical composition. In certain embodiments, the methods reduce an amount of HBV virus, mRNA, DNA, protein and/or an amount of HBV antigen in a subject infected with a hepatitis B virus, the method comprising administering a therapeutically effective amount of a modified oligonucleotide or pharmaceutical composition as described above to the subject so as to reduce the hepatitis B virus infection and the hepatitis B antigen, compared to the amount of HBV virus, mRNA, DNA protein and/or an amount of HBV antigen in the subject before treatment, wherein the amount of mRNA is reduced at least 85% compared to the amount before administration of the modified oligonucleotide or pharmaceutical composition. In certain embodiments, the methods reduce an amount of HBV virus, mRNA, DNA, protein and/or an amount of HBV antigen in a subject infected with a hepatitis B virus, the method comprising administering a therapeutically effective amount of a modified oligonucleotide or pharmaceutical composition as described above to the subject so as to reduce the hepatitis B virus infection and the hepatitis B antigen, compared to the amount of HBV virus, mRNA, DNA, protein and/or an amount of HBV antigen in the subject before treatment, wherein the amount of mRNA is reduced at least 90% compared to the amount before administration of the modified oligonucleotide or pharmaceutical composition. In certain embodiments, the methods reduce an amount of HBV virus, mRNA, DNA, protein and/or an amount of HBV antigen in a subject infected with a hepatitis B virus, the method comprising administering a therapeutically effective amount of a modified oligonucleotide or pharmaceutical composition as described above to the subject so as to reduce the hepatitis B virus infection, mRNA, protein and/or the hepatitis B antigen, compared to the amount of HBV mRNA, protein and/or an amount of HBV antigen in the subject before treatment, wherein the amount of mRNA is reduced at least 95% compared to the amount before administration of the modified oligonucleotide or pharmaceutical composition. In related methods, the HBV antigen may be HBsAg or may be HBeAg, and more particularly, the amount of HBV antigen may be sufficiently reduced to result in seroconversion, defined as serum HBeAg absence plus serum HBeAb presence if monitoring HBeAg as the determinant for seroconversion, or defined as serum HBsAg absence if monitoring HBsAg as the determinant for seroconversion, as determined by currently available detection limits of commercial ELISA systems.

[0433] The disclosure provides methods for promoting seroconversion of a hepatitis B virus in a mammal infected with HBV, the method comprising administering a therapeutically effective amount of a modified oligonucleotide, for example a modified oligonucleotide comprising any one of SEQ ID NOS: 11-666, or a modified oligonucleotide comprising 1, 2, 3, 4, or 5 modifications thereto, or pharmaceutical composition as described above to a subject infected with hepatitis B; monitoring for presence of HBeAg plus HBeAb in a serum sample of the subject, or monitoring for presence of HBsAg in a serum sample of the subject, such that the absence of HBeAg plus the presence of HBeAb in the serum sample if monitoring HBeAg as the determinant for seroconversion, or the absence of HBsAg in the serum sample if monitoring HBsAg as the determinant for seroconversion, as determined by current detection limits of commercial ELISA systems, is indication of seroconversion in the subject.

[0434] Certain embodiments provide the use of a modified oligonucleotide, for example a modified oligonucleotide comprising any one of SEQ ID NOS: 11-666, or a modified oligonucleotide comprising 1, 2, 3, 4, or 5 modifications thereto, or a pharmaceutical composition as described herein for preventing, ameliorating or treating liver disease, or symptom thereof, in an subject.

[0435] In some embodiments, EC₅₀ of cells treated with a modified oligonucleotide (e.g., SEQ ID NO: 11-666) was measured as a proxy for the effectiveness of the modified oligonucleotide. In some embodiments, the EC₅₀ is about 0.1 nM to about 250 nM. In some embodiments, the EC₅₀ is less than 250 nM, less than 200 nM, less than 150 nM, less than 100 nM, less than 90 nM, less than 80 nM, less than 70 nM, less than 65 nM, less than 60 nM, less than 55 nM, less than 50 nM, less than 49 nM, less than 47 nM, less than 46 nM, less than 45 nM, less than 44 nM, less than 43 nM, less than 42 nM, less than 41 nM, less than 40 nM, less than 39 nM, less than 38 nM, less than 37 nM, less than 36 nM, less than 35 nM, less than 34 nM, less than 33 nM, less than 32 nM, less than 31 nM, less than 30 nM, less than 29 nM, less than 28 nM, less than 27 nM, less than 26 nM, less than 25 nM, less than 24 nM, less than 23 nM, less than 22 nM, less than 21 nM, less than 20 nM, less than 19 nM, less than 18 nM, less than 17 nM, less than 16 nM, less than 15 nM, less than 14 nM, less than 13 nM, less than 12 nM, less than 11 nM, less than 10 nM, less than 9 nM, less than 8 nM, less than 7 nM, less than 6 nM, less than 5 nM, less than 4 nM, less than 3 nM, less than 2 nM, less than 1 nM, less than 0.9 nM, less than 0.8 nM, less than 0.7 nM, less than 0.6 nM, less than 0.5 nM, less than 0.4 nM, less than 0.3 nM, less than 0.2 nM or less than 0.1 nM.

[0436] In some embodiments, the ratio of EC₅₀ of cells treated with a modified oligonucleotide (e.g., SEQ ID NO: 11-666)/EC50 of cells treated with a reference oligonucleotide (e.g., SEQ ID NO: 10) is calculated as a measure of efficacy in reducing HBsAg levels. In some embodiments, the ratio is about 0.05 to about 250. In some embodiments, the EC₅₀ ratio is less than 250, less than 150, less than 100, less than 90, less than 80, less than 70, less than 65, less than 60, less than 55, less than 50, less than 49, less than 47, less than 46, less than 45, less than 44, less than 43, less than 42, less than 41, less than 40, less than 39, less than 38, less than 37, less than 36, less than 35, less than 34, less than 33, less than 32, less than 31, less than 30, less than 29, less than 28, less than 27, less than 26, less than 25, less than 24, less than 23, less than 22, less than 21, less than 20, less than 19, less than 18, less than 17, less than 16, less than 15, less than 14, less than 13, less than 12, less than 11, less than 10, less than 9, less than 8, less than 7, less than 6, less than 5, less than 4, less than 3, less than 2, less than 1, less than 0.9, less than 0.8, less than 0.7, less than 0.6, less than 0.5, less than 0.4, less than 0.3, less than 0.2 or less than 0.1.

[0437] In certain embodiments, the compounds or compositions as described herein are efficacious by virtue of having at least one of an in vitro IC₅₀ of less than 250 nM, less than 200 nM, less than 150 nM, less than 100 nM, less than 90 nM, less than 80 nM, less than 70 nM, less than 65 nM, less than 60 nM, less than 55 nM, less than 50 nM, less than 49 nM, less than 47 nM, less than 46 nM, when delivered to HepG2.2.1 cells.

[0438] In certain embodiments, the compounds or compositions as described herein are efficacious by virtue of having at least one of an in vitro IC₅₀ of less than 250 nM, less than 200 nM, less than 100 nM, less than 90 nM, less than 80 nM, less than 70 nM, less than 60 nM, less than 50 nM, less than 40 nM, less than 35 nM, less than 34 nM, less than 33 nM, less than 32 nM, less than 31 nM, when delivered to HepG2.2.1 cells.

[0439] In certain embodiments, the compounds or compositions as described herein are efficacious by virtue of having at least one of an in vitro IC₅₀ of less than 20 μM, less than 10 uM, less than 9.5 M, less than 9.0 uM, less than 8.5 uM, less than 8.0 uM, less than 7.5 uM, less than 7.0 uM, less than 6.5 uM, less than 6.0 uM, less than 5.5 uM, less than 5.0 M, less than 4.5 uM, less than 4.0 uM, less than 3.5 uM, less than 3.0 uM, less than 2.5 μM, when delivered to HepG2.2.1 cells as described herein.

[0440] In some embodiments, the MTT CC25 value (nM) is used as a measure of cellular toxicity. In some embodiments the MTT CC25 of cells treated with the modified oligonucleotide described herein is about 10 nM to about 250 nM. In some embodiments the MTT CC25 is greater than 10 nM, greater than 15 nM, greater than 20 nM, greater than 25 nM, greater than 30 nM, greater than 35 nM, greater than 40 nM, greater than 45 nM, greater than 50 nM, greater than 55 nM, greater than 60 nM, greater than 65 nM, greater than 70 nM, greater than 75 nM, greater than 80 nM, greater than 85 nM, greater than 90 nM, greater than 95 nM, greater than 100 nM, greater than 110 nM, greater than 120 nM, greater than 130 nM, greater than 140 nM, greater than 150 nM, greater than 160 nM, greater than 170 nM, greater than 180 nM, greater than 190 nM, greater than 200 nM, greater than 210 nM, greater than 220 nM, greater than 230 nM, greater than 240 nM or greater than 250 nM.

[0441] In some embodiments, the CCK8 CC30 (nM) is used as a measure of cellular toxicity. In some embodiments, the CCK8 CC30 of cells treated with the modified oligonucleotide described herein is about 10 nM to about 250 nM. In some embodiments, the CCK8 CC30 is greater than 10 nM, greater than 15 nM, greater than 20 nM, greater than 25 nM, greater than 30 nM, greater than 35 nM, greater than 40 nM, greater than 45 nM, greater than 50 nM, greater than 55 nM, greater than 60 nM, greater than 65 nM, greater than 70 nM, greater than 75 nM, greater than 80 nM, greater than 85 nM, greater than 90 nM, greater than 95 nM, greater than 100 nM, greater than 110 nM, greater than 120 nM, greater than 130 nM, greater than 140 nM, greater than 150 nM, greater than 160 nM, greater than 170 nM, greater than 180 nM, greater than 190 nM, greater than 200 nM, greater than 210 nM, greater than 220 nM, greater than 230 nM, greater than 240 nM or greater than 250 nM.

[0442] In some embodiments, the “C/E ratio” is used as a measure of efficacy in reducing HBsAg levels relative to cellular toxicity. In some embodiments, the C/E ratio is calculated by taking the ratio of MTT CC25 (nM) of a modified oligonucleotide/MTT CC25 (nM) of a reference oligonucleotide (e.g., SEQ ID NO: 10) and dividing it by the ratio of HBsAg EC₅₀ of a modified oligonucleotide (e.g., SEQ ID NO: 11-666)/HBsAg EC50 of a reference oligonucleotide (e.g., SEQ ID NO: 10). In some embodiments, the C/E ratio is calculated by taking the ratio of CCK8 CC25 (nM) of a modified oligonucleotide/CCK8 CC25 (nM) of a reference oligonucleotide (e.g., SEQ ID NO: 10) and dividing it by the ratio of HBsAg EC₅₀ of a modified oligonucleotide (e.g., SEQ ID NO: 11-666)/HBsAg EC50 of a reference oligonucleotide (e.g., SEQ ID NO: 10). In some embodiments, the C/E ratio is about 0.01 to about 50. In some embodiments, the C/E ratio is greater than 1, greater than 1.1, greater than 1.2, greater than 1.3, greater than 1.4, greater than 1.5, greater than 1.6, greater than 1.7, greater than 1.8, greater than 1.9, greater than 2.0, greater than 2.1, greater than 2.2, greater than 2.3, greater than 2.4, greater than 2.5, greater than 2.6, greater than 2.7, greater than 2.8, greater than 2.9, greater than 3.0, greater than 10, greater than 11, greater than 12, greater than 13, greater than 14, greater than 15, greater than 16, greater than 17, greater than 18, greater than 19, greater than 20, greater than 21, greater than 22, greater than 23, greater than 24, greater than 25, greater than 30, greater than 35, greater than 40, greater than 45 or greater than 50.

[0443] In certain embodiments, the compounds or compositions as described herein are highly tolerable as demonstrated by having at least one of an increase an ALT or AST value of no more than 4 fold, 3 fold, or 2 fold over saline treated animals or an increase in liver, spleen, or kidney weight of no more than 30%, 20%, 15%, 12%, 10%, 5%, or 2%. In certain embodiments, the compounds or compositions as described herein are highly tolerable as demonstrated by having no increase of ALT or AST over saline treated animals. In certain embodiments, the compounds or compositions as described herein are highly tolerable as demonstrated by having no increase in liver, spleen, or kidney weight over saline treated animals.

[0444] In some embodiments, animals treated with the compounds or compositions comprising the modified oligonucleotides (e.g., SEQ ID NOS: 11-666) have a ALT level that is about 1.1 fold to about 10 fold decreased relative to an animal treated with a reference compound (e.g., SEQ ID NO: 10). In some embodiments, animals treated with the compounds or compositions comprising the modified oligonucleotides (e.g., SEQ ID NOS: 11-666) have a ALT level that is at least 1.25 fold decreased relative to an animal treated with a reference compound (e.g., SEQ ID NO: 10). In some embodiments, animals treated with the compounds or compositions comprising the modified oligonucleotides (e.g., SEQ ID NOS: 11-666) have a ALT level that is are 1.1 fold, 1.2 fold, 1.3 fold, 1.4 fold, 1.5 fold, 1.6 fold, 1.7 fold, 1.8 fold, 1.9 fold, 2.0 fold, 2.1 fold, 2.2 fold, 2.3, fold, 2.4 fold, 2.5 fold, 2.6 fold, 2.7 fold, 2.8 fold, 2.9 fold, 3.0 fold, 3.1 fold, 3.2 fold, 3.3 fold, 3.4 fold, 3.5 fold, 3.6 fold, 3.7 fold, 3.8 fold, 3.9 fold, 4.0 fold, 4.1 fold, 4.2 fold, 4.3 fold, 4.4 fold, 4.5 fold, 4.6 fold, 4.7 fold, 4.8 fold, 4.9 fold or 5.0 fold decreased relative to an animal treated with a reference compound (e.g., SEQ ID NO: 10).

[0445] In some embodiments, animals treated with the compounds or compositions comprising the modified oligonucleotides (e.g., SEQ ID NOS: 11-666) have a AST level that is about 1.1 fold to about 10 fold decreased relative to an animal treated with a reference compound (e.g., SEQ ID NO: 10). In some embodiments, animals treated with the compounds or compositions comprising the modified oligonucleotides (e.g., SEQ ID NOS: 11-666) have a AST level that is at least 1.25 fold decreased relative to an animal treated with a reference compound (e.g., SEQ ID NO: 10). In some embodiments, animals treated with the compounds or compositions comprising the modified oligonucleotides (e.g., SEQ ID NOS: 11-666) have a AST level that is are 1.1 fold, 1.2 fold, 1.3 fold, 1.4 fold, 1.5 fold, 1.6 fold, 1.7 fold, 1.8 fold, 1.9 fold, 2.0 fold, 2.1 fold, 2.2 fold, 2.3, fold, 2.4 fold, 2.5 fold, 2.6 fold, 2.7 fold, 2.8 fold, 2.9 fold, 3.0 fold, 3.1 fold, 3.2 fold, 3.3 fold, 3.4 fold, 3.5 fold, 3.6 fold, 3.7 fold, 3.8 fold, 3.9 fold, 4.0 fold, 4.1 fold, 4.2 fold, 4.3 fold, 4.4 fold, 4.5 fold, 4.6 fold, 4.7 fold, 4.8 fold, 4.9 fold or 5.0 fold decreased relative to an animal treated with a reference compound (e.g., SEQ ID NO: 10).

[0446] Certain embodiments provide the use of a modified oligonucleotide, for example a modified oligonucleotide comprising any one of SEQ ID NOS: 11-666, or a pharmaceutical composition as described herein for the manufacture of a medicament for treating, ameliorating, delaying or preventing an HBV-related disease, disorder or condition in an animal.

[0447] Certain embodiments provide the use of a modified oligonucleotide, for example a modified oligonucleotide comprising any one of SEQ ID NOS: 11-666, or a pharmaceutical composition as described herein for the manufacture of a medicament for treating, ameliorating, delaying or preventing liver disease in an animal.

### Kits and Articles of Manufacture

[0448] The disclosure provides kits comprising the modified oligonucleotides described herein, and pharmaceutical compositions comprising same. In some embodiments, the modified oligonucleotide comprises a sequence of any one of SEQ ID NOS: 11-666, or a modified oligonucleotide comprising 1, 2, 3, 4, or 5 modifications thereto.

[0449] Certain embodiments provide a kit for treating, preventing, or ameliorating an HBV-related disease, disorder or condition, or a symptom thereof, as described herein wherein the kit comprises: a) a compound or compositions as described herein, for example a composition comprising a modified oligonucleotide comprising a sequence of any one of SEQ ID NOS: 11-666, or a modified oligonucleotide comprising 1, 2, 3, 4, or 5 modifications thereto; and optionally b) an additional agent or therapy as described herein. The kit can further include instructions or a label for using the kit to treat, prevent, or ameliorate the HBV-related disease, disorder or condition.

[0450] Compositions comprising modified oligonucleotides can be lyophilized before being packaged in the kit, or can be provided in solution with a pharmaceutically acceptable carrier, diluent of excipient.

[0451] In certain embodiments, the kit further comprises at least one additional agent for the treatment of an HBV-related disease, disorder or condition.

### Dosing and Administration

[0452] The disclosure provides methods comprising administering a therapeutically effective dose of the modified oligonucleotides, for example a modified oligonucleotide comprising any one of SEQ ID NOS: 11-666, or a modified oligonucleotide comprising 1, 2, 3, 4, or 5 modifications thereto, or a pharmaceutical composition comprising same, to a subject in need thereof.

[0453] In certain embodiments, a therapeutically effective dose of the for example a modified oligonucleotides, or pharmaceutical compositions comprising same, comprises a dose at which a maximum log 10 serum HBsAg reduction of at least-0.2, at least-0.3, at least-0.4, at least-0.5, at least-0.7, at least-1.0. at least-1.5, at least-2.0, at least-2.5, at least-3.0, at least-3.5, at least at least-4.0, or at least-4.5 is observed. In some embodiments, the reduction in maximum log 10 serum HBsAg is observed 1, 2, 3, 4, 5, 6, 7, 8, 9, 10, 11, 12, 13, 14, 15, 16, 17, 18, 19, 20, 21, 22, 23, 24, 25, 26, 27, 28, 29, 30, 31, 32, 33, 34, or 35 days after administration of the therapeutically effective dose.

[0454] In certain embodiments, a therapeutically effective dose of the for example a modified oligonucleotides, or pharmaceutical compositions comprising same, comprises a dose that reduces a level of HbsAg in serum of the subject by at least 5%, at least 10%, at least 20%, at least 30%, at least 40%, at least 50%, at least 60%, at least 70%, at least 80%, at least 90%, at least 95%, or at least 99%. In some embodiments, the reduction in serum HBsAg is observed 1, 2, 3, 4, 5, 6, 7, 8, 9, 10, 11, 12, 13, 14, 15, 16, 17, 18, 19, 20, 21, 22, 23, 24, 25, 26, 27, 28, 29, 30, 31, 32, 33, 34, or 35 days after administration of the therapeutically effective dose.

[0455] In certain embodiments, a therapeutically effective dose of the for example a modified oligonucleotides, or pharmaceutical compositions comprising same, comprises a dose at which a maximum log 10 serum HBeAg reduction of at least-0.2, at least-0.3, at least-0.4, at least-0.5, at least-0.7, at least-1.0. at least-1.5, at least-2.0, at least-2.5, at least-3.0, at least-3.5, at least at least-4.0, or at least-4.5 is observed. In some embodiments, the reduction in maximum log 10 serum HBeAg is observed 1, 2, 3, 4, 5, 6, 7, 8, 9, 10, 11, 12, 13, 14, 15, 16, 17, 18, 19, 20, 21, 22, 23, 24, 25, 26, 27, 28, 29, 30, 31, 32, 33, 34, or 35 days after administration of the therapeutically effective dose.

[0456] In certain embodiments, a therapeutically effective dose of the for example a modified oligonucleotides, or pharmaceutical compositions comprising same, comprises a dose that reduces a level of HbeAg in serum of the subject by at least 5%, at least 10%, at least 20%, at least 30%, at least 40%, at least 50%, at least 60%, at least 70%, at least 80%, at least 90%, at least 95%, or at least 99%. In some embodiments, the reduction in serum HBeAg is observed 1, 2, 3, 4, 5, 6, 7, 8, 9, 10, 11, 12, 13, 14, 15, 16, 17, 18, 19, 20, 21, 22, 23, 24, 25, 26, 27, 28, 29, 30, 31, 32, 33, 34, or 35 days after administration of the therapeutically effective dose.

[0457] In certain embodiments, the modified oligonucleotides or pharmaceutical compositions comprising same are administered to a subject in a dose ranging from 10 mg to 1500 mg, 10 mg to 1000 mg, 10 mg to 900 mg, 10 mg to 800 mg, 10 mg to 700 mg, 10 mg to 600 mg, 10 mg to 500 mg, 10 mg to 400 mg, 10 mg to 300 mg, 10 mg to 200 mg, 10 mg to 100 mg, 50 mg to 1500 mg, 50 mg to 1000 mg, 50 mg to 900 mg, 50 mg to 800 mg, 50 mg to 700 mg, 50 mg to 600 mg, 50 mg to 500 mg, 50 mg to 400 mg, 50 mg to 300 mg, 50 mg to 200 mg, 50 mg to 100 mg, 100 mg to 1500 mg, 100 mg to 1000 mg, 100 mg to 900 mg, 100 mg to 800 mg, 100 mg to 700 mg, 100 mg to 600 mg, 100 mg to 500 mg, 100 mg to 400 mg, 100 mg to 300 mg, 100 mg to 200 mg, 200 mg to 1500 mg, 200 mg to 1000 mg, 200 mg to 900 mg, 200 mg to 800 mg, 200 mg to 700 mg, 200 mg to 600 mg, 200 mg to 500 mg, 200 mg to 400 mg, 200 mg to 300 mg, 300 mg to 1500 mg, 300 mg to 1000 mg, 300 mg to 900 mg, 300 mg to 800 mg, 300 mg to 700 mg, 300 mg to 600 mg, 300 mg to 500 mg, or 300 mg to 400 mg of the modified oligonucleotides. In certain embodiments, the modified oligonucleotides or pharmaceutical compositions comprising same are administered to a subject in a dose ranging from 50 mg to 1500 mg of the modified oligonucleotides. In certain embodiments, the modified oligonucleotides or pharmaceutical compositions comprising same are administered to a subject in a dose ranging from 50 mg to 1000 mg of the modified oligonucleotides. In certain embodiments, the modified oligonucleotides or pharmaceutical compositions comprising same are administered to a subject in a dose ranging from 50 mg to 700 mg of the modified oligonucleotides. In certain embodiments, the modified oligonucleotides or pharmaceutical compositions comprising same are administered to a subject in a dose ranging from 50 mg to 500 mg of the modified oligonucleotides. In certain embodiments, the modified oligonucleotides or pharmaceutical compositions comprising same are administered to a subject in a dose ranging from 50 mg to 450 mg of the modified oligonucleotides. In certain embodiments, the modified oligonucleotides or pharmaceutical compositions comprising same are administered to a subject in a dose ranging from 50 mg to 300 mg of the modified oligonucleotides. In certain embodiments, the modified oligonucleotides or pharmaceutical compositions comprising same are administered to a subject in a dose ranging from 50 mg to 200 mg of the modified oligonucleotides. In certain embodiments, the modified oligonucleotides or pharmaceutical compositions comprising same are administered to a subject in a dose ranging from 100 mg to 1500 mg of the modified oligonucleotides. In certain embodiments, the modified oligonucleotides or pharmaceutical compositions comprising same are administered to a subject in a dose ranging from 100 mg to 1000 mg of the modified oligonucleotides. In certain embodiments, the modified oligonucleotides or pharmaceutical compositions comprising same are administered to a subject in a dose ranging from 100 mg to 700 mg of the modified oligonucleotides. In certain embodiments, the modified oligonucleotides or pharmaceutical compositions comprising same are administered to a subject in a dose ranging from 100 mg to 500 mg of the modified oligonucleotides. In certain embodiments, the modified oligonucleotides or pharmaceutical compositions comprising same are administered to a subject in a dose ranging from 100 mg to 450 mg of the modified oligonucleotides. In certain embodiments, the modified oligonucleotides or pharmaceutical compositions comprising same are administered to a subject in a dose ranging from 100 mg to 300 mg of the modified oligonucleotides. In certain embodiments, the modified oligonucleotides or pharmaceutical compositions comprising same are administered to a subject in a dose ranging from 100 mg to 200 mg of the modified oligonucleotides.

[0458] In certain embodiments, the modified oligonucleotides or pharmaceutical compositions comprising same are administered at a dose ranging from 0.01 mg/kg to 30.0 mg/kg, 0.01 mg/kg to 27.0 mg/kg, 0.01 mg/kg to 25.0 mg/kg, 0.01 mg/kg to 22.0 mg/kg, 0.01 mg/kg to 20.0 mg/kg, 0.01 0.01 mg/kg to 15.0 mg/kg, 0.01 mg/kg to 10.0 mg/kg, 0.01 mg/kg to 8.0 mg/kg, 0.01 mg/kg to 5.0 mg/kg, 0.01 mg/kg to 4.0 mg/kg, 0.01 mg/kg to 3.0 mg/kg, 0.01 mg/kg to 2.0 mg/kg, 0.01 mg/kg to 1.0 mg/kg, 0.01 mg/kg to 0.5 mg/kg, 0.01 mg/kg to 0.1 mg/kg, 0.1 mg/kg to 30.0 mg/kg, 0.1 mg/kg to 27.0 mg/kg, 0.1 mg/kg to 25.0 mg/kg, 0.1 mg/kg to 22.0 mg/kg, 0.1 mg/kg to 20.0 mg/kg, 0.1 mg/kg to 18.0 mg/kg, 0.1 mg/kg to 15.0 mg/kg, 0.1 mg/kg to 12.0 mg/kg, 0.1 mg/kg to 10.0 mg/kg, 0.1 mg/kg to 8.0 mg/kg, 0.1 mg/kg to 5.0 mg/kg, 0.1 mg/kg to 4.0 mg/kg, 0.1 mg/kg to 3.0 mg/kg, 0.1 mg/kg to 2.0 mg/kg, 0.1 mg/kg to 1.0 mg/kg, 0.1 mg/kg to 0.5 mg/kg, 1.0 mg/kg to 30.0 mg/kg, 1.0 mg/kg to 27.0 mg/kg, 1.0 mg/kg to 25.0 mg/kg, 1.0 mg/kg to 22.0 mg/kg, 1.0 mg/kg to 20.0 mg/kg, 1.0 mg/kg to 18.0 mg/kg, 1.0 mg/kg to 15.0 mg/kg, 1.0 mg/kg to 12.0 mg/kg, 1.0 mg/kg to 10.0 mg/kg, 1.0 mg/kg to 8.0 mg/kg, 1.0 mg/kg to 5.0 mg/kg, 1.0 mg/kg to 4.0 mg/kg, 1.0 mg/kg to 3.0 mg/kg, 1.0 mg/kg to 2.0 mg/kg, 5.0 mg/kg to 30.0 mg/kg, 5.0 mg/kg to 27.0 mg/kg, 5.0 mg/kg to 25.0 mg/kg, 5.0 mg/kg to 22.0 mg/kg, 5.0 mg/kg to 20.0 mg/kg, 5.0 mg/kg to 18.0 mg/kg, 5.0 mg/kg to 15.0 mg/kg, 5.0 mg/kg to 10.0 mg/kg, 5.0 mg/kg to 7.0 mg/kg, 10.0 mg/kg to 30.0 mg/kg, 10.0 mg/kg to 27.0 mg/kg, 10.0 mg/kg to 25.0 mg/kg, 10.0 mg/kg to 22.0 mg/kg, 10.0 mg/kg to 20.0 mg/kg, 10.0 mg/kg to 18.0 mg/kg, 10.0 mg/kg to 15.0 mg/kg, 15.0 mg/kg to 30.0 mg/kg, 15.0 mg/kg to 25.0 mg/kg, 15.0 mg/kg to 20.0 mg/kg, 20 mg/kg to 30 mg/kg or 25 mg/kg to 30 mg/kg of the modified oligonucleotides. In certain embodiments, the modified oligonucleotides or pharmaceutical compositions comprising same are administered at a dose ranging from 0.01 mg/kg to 30 mg/kg of the modified oligonucleotides. In certain embodiments, the modified oligonucleotides or pharmaceutical compositions comprising same are administered at a dose ranging from 0.1 mg/kg to 25 mg/kg of the modified oligonucleotides. In certain embodiments, the modified oligonucleotides or pharmaceutical compositions comprising same are administered at a dose ranging from 1.0 mg/kg to 20 mg/kg of the modified oligonucleotides. In certain embodiments, the modified oligonucleotides or pharmaceutical compositions comprising same are administered at a dose ranging from 5.0 mg/kg to 20 mg/kg of the modified oligonucleotides. In certain embodiments, the modified oligonucleotides or pharmaceutical compositions comprising same are administered at a dose ranging from 1.0 mg/kg to 15 mg/kg of the modified oligonucleotides. In certain embodiments, the modified oligonucleotides or pharmaceutical compositions comprising same are administered at a dose ranging from 1.0 mg/kg to 5.0 mg/kg of the modified oligonucleotides.

[0459] In certain embodiments, the modified oligonucleotides or pharmaceutical compositions comprising same are administered to a subject daily, every 2 days, every 3 days, every 4 days, every 5 days, every 6 days, every 7 days, every 8 days, every 9 days, every 10 days, every 11 days, every 12 days, every 13 days, every 2 weeks, every 3 weeks, every 4 weeks, every 5 weeks, every 6 weeks, every 7 weeks, every 8 weeks, every 9 weeks, every 10 weeks, every 11 weeks, every 12 weeks, every 13 weeks, every 2 months, every 3 months or every 4 months.

[0460] In certain embodiments, the modified oligonucleotides or pharmaceutical compositions comprising same are administered to a subject daily, every 2 days, every 3 days, every 4 days, every 5 days, every 6 days, every 7 days, every 8 days, every 9 days, every 10 days, every two weeks, every three weeks or monthly.

[0461] In certain embodiments, the modified oligonucleotides or pharmaceutical compositions comprising same are administered to a subject for at least 1 week, at least 2 weeks, at least 3 weeks, at least 1 month, at least 2 months, at least 3 months, at least 4 months, at least 5 months, at least 6 months, at least 7 months, at least 8 months, at least 9 months, at least 10 months, at least 11 months, at least 1 year, at least 1.5 years, at least 2 years, at least 3 years, at least 4 years, or at least 5 years.

[0462] In certain embodiments, modified oligonucleotides or pharmaceutical compositions comprising same are administered to the subject until a specific outcome is achieved, for example the level of HBsAg and/or HbeAg in the serum of the subject is reduced. In certain embodiments, administration of the modified oligonucleotides or pharmaceutical compositions comprising same to the subject continues until the HBsAg and/or HbeAg in the serum of the subject is reduced by at least 5%, 10%, 20%, 30%, 40%, 50%, 60%, 70%, 80%, 90%, 95% or 99% compared to before the administration of the modified oligonucleotides or pharmaceutical compositions comprising same.

[0463] In certain embodiments, the modified oligonucleotides or pharmaceutical compositions comprising same are administered to a subject once a day, twice a day, three times a day or four times a day.

[0464] In certain embodiments, the modified oligonucleotides or pharmaceutical compositions comprising same are administered to a subject every day. In certain embodiments, the modified oligonucleotides or pharmaceutical compositions comprising same are administered to a subject every two days. In certain embodiments, the modified oligonucleotides or pharmaceutical compositions comprising same are administered to a subject every three days. In certain embodiments, the modified oligonucleotides or pharmaceutical compositions comprising same are administered to a subject every four days. In certain embodiments, the modified oligonucleotides or pharmaceutical compositions comprising same are administered to a subject every five days. In certain embodiments, t the modified oligonucleotides or pharmaceutical compositions comprising same are administered to a subject every six days. In certain embodiments, the modified oligonucleotides or pharmaceutical compositions comprising same are administered to a subject every seven days. In certain embodiments, the modified oligonucleotides or pharmaceutical compositions comprising same are administered to a subject every eight days. In certain embodiments, the modified oligonucleotides or pharmaceutical compositions comprising same are administered to a subject every nine days. In certain embodiments, the r the modified oligonucleotides or pharmaceutical compositions comprising same are administered to a subject every ten days. In certain embodiments, the modified oligonucleotides or pharmaceutical compositions comprising same are administered to a subject every eleven days. In certain embodiments, the modified oligonucleotides or pharmaceutical compositions comprising same are administered to a subject every twelve days. In certain embodiments, the modified oligonucleotides or pharmaceutical compositions comprising same are administered to a subject every thirteen days. In certain embodiments, the modified oligonucleotides or pharmaceutical compositions comprising same are administered to a subject every two weeks. In certain embodiments, the modified oligonucleotides or pharmaceutical compositions comprising same are administered to a subject every three weeks. In certain embodiments, the modified oligonucleotides or pharmaceutical compositions comprising same are administered to a subject every month. In certain embodiments, the modified oligonucleotides or pharmaceutical compositions comprising same are administered to a subject every 2 months. In certain embodiments, the modified oligonucleotides or pharmaceutical compositions comprising same are administered to a subject every 3 months. In certain embodiments, the modified oligonucleotides or pharmaceutical compositions comprising same are administered to a subject every 4 months. In certain embodiments, the modified oligonucleotides or pharmaceutical compositions comprising same are administered to a subject every 5 months. In certain embodiments, the modified oligonucleotides or pharmaceutical compositions comprising same are administered to a subject every 6 months. In certain embodiments, the modified oligonucleotides or pharmaceutical compositions comprising same are administered to a subject two or more times a year. In certain embodiments, the modified oligonucleotides or pharmaceutical compositions comprising same are administered to a subject two or more times every two years. In certain embodiments, the modified oligonucleotides or pharmaceutical compositions comprising same are administered to a subject two or more times every two or more years.

[0465] In certain embodiments, the modified oligonucleotides or pharmaceutical compositions comprising same are administered to a subject once every 1-30 days. In certain embodiments, the modified oligonucleotides or pharmaceutical compositions comprising same are administered to a subject once every 1-22 days. In certain embodiments, the modified oligonucleotides or pharmaceutical compositions comprising same are administered to a subject once every 1-15 days. In certain embodiments, the modified oligonucleotides or pharmaceutical compositions comprising same are administered to a subject once every 1-8 days. In certain embodiments, the modified oligonucleotides or pharmaceutical compositions comprising same are administered to a subject once every 1-5 days. In certain embodiments, the modified oligonucleotides or pharmaceutical compositions comprising same are administered to a subject once every 1-4 days. In certain embodiments, the modified oligonucleotides or pharmaceutical compositions comprising same are administered to a subject once every 1-3 days. In certain embodiments, the modified oligonucleotides or pharmaceutical compositions comprising same are administered to a subject once every 10-20 days. In certain embodiments, the modified oligonucleotides or pharmaceutical compositions comprising same are administered to a subject once every 5-15 days. In certain embodiments, the modified oligonucleotides or pharmaceutical compositions comprising same are administered to a subject once every 15-30 days.

[0466] In certain embodiments, the modified oligonucleotides or pharmaceutical compositions comprising same are administered at least once every 36 hours. In certain embodiments, t the modified oligonucleotides or pharmaceutical compositions comprising same are administered at least once every 48 hours. In certain embodiments, the modified oligonucleotides or pharmaceutical compositions comprising same are administered at least once every 60 hours. In certain embodiments, the modified oligonucleotides or pharmaceutical compositions comprising same are administered at least once every 72 hours. In certain embodiments, the modified oligonucleotides or pharmaceutical compositions comprising same are administered at least once every 84 hours. In certain embodiments, t the modified oligonucleotides or pharmaceutical compositions comprising same are administered at least once every 96 hours. In certain embodiments, the modified oligonucleotides or pharmaceutical compositions comprising same are administered at least once every 5 days. In certain embodiments, the modified oligonucleotides or pharmaceutical compositions comprising same are administered at least once every 6 days. In certain embodiments, the modified oligonucleotides or pharmaceutical compositions comprising same are administered at least once every 7 days. In certain embodiments, the modified oligonucleotides or pharmaceutical compositions comprising same are administered at least once every 8-10 days. In certain embodiments, the modified oligonucleotides or pharmaceutical compositions comprising same are administered at least once every 10-12 days. In certain embodiments, the modified oligonucleotides or pharmaceutical compositions comprising same are administered at least once every 12-15 days. In certain embodiments, the modified oligonucleotides or pharmaceutical compositions comprising same are administered at least once every 15-25 days. In certain embodiments, the modified oligonucleotides or pharmaceutical compositions comprising same are administered at least once every 20-30 days.

[0467] In some embodiments, administration of the modified oligonucleotides or pharmaceutical compositions comprising same comprises a dosing holiday. For example, the modified oligonucleotides or pharmaceutical compositions comprising same are administered to the subject every three days, followed by a week, two weeks, three weeks or a month with no administration, followed by a resumption of dosing. The person of ordinary skill in the art will understand that this dosing holiday is exemplary. Dosing holidays of other duration and frequency are contemplated as within the scope of the instant disclosure. As a further example, the modified oligonucleotides or pharmaceutical compositions comprising same may be administered to the subject until levels of HBsAg or HbeAg fall below a certain threshold, or no HBV infection is detected in the subject, followed by a dosing holiday, and resumption of dosing if HBsAg or HbeAg in the serum of the subject is again detected.

[0468] In certain embodiments, a single one time dose of the modified oligonucleotides or pharmaceutical compositions comprising same is administered to a subject. In other embodiments, multiple doses of the modified oligonucleotides or pharmaceutical compositions comprising same are administered to the subject.

[0469] In certain embodiments, administration of the modified oligonucleotides or pharmaceutical compositions comprising same can comprise a dosing schedule in which the modified oligonucleotides or pharmaceutical compositions comprising same are administered more frequently initially, followed by less frequent doses. Such a dosing schedule has the advantage in that it can be used to maintain a steady state liver concentration of the modified oligonucleotides described herein. For example, if the liver half-life of the modified oligonucleotide is 3-4 weeks, an initial dosing schedule comprising loading doses on days 1 and 4, followed by weekly maintenance doses starting on day 8 (e.g., day 8, 15 and 22 etc.) can be used to achieve a steady state liver concentration of the modified oligos of the disclosure.

[0470] In certain embodiments, administration of the modified oligonucleotides or pharmaceutical compositions comprising same comprises a loading dose, followed by a loading maintenance dose.

[0471] The term “loading dose” refers to one or more doses of the modified oligonucleotides or pharmaceutical compositions that are administered in addition to a dosage regimen, or that are higher than the remaining doses in the dosing regimen. As used herein a “loading dose” may refer to one or more doses of the modified oligonucleotides or pharmaceutical compositions which are the same concentration or a lower concentration (if administered in addition to the regular dosage regimen), or a higher concentration than the doses of the modified oligonucleotides or pharmaceutical compositions that are administered as part of a dosage regimen (if administered in place of the regular dosage regimen). Loading doses may also be administered more frequently than maintenance doses in a dosing regimen.

[0472] The term “maintenance dose” as used herein refers to the repeated, regular administration of a therapeutic agent. The maintenance dose as used herein does not include a loading dose, which may, in some embodiments, be administered in addition, e.g., prior, to the maintenance dose.

[0473] In an exemplary dosing regimen comprising a loading dose and a maintenance dose, the modified oligonucleotides or pharmaceutical compositions are administered at a higher loading dose, followed by a lower maintenance dose. For example, the loading dose can be about 1.1×, 1.2×, 1.3×, 1.4×, 1.5×, 1.6×, 1.7×, 1.8×, 1.9×, 2.0×, 2.1×, 2.2×, 2.3×, 2.4×, 2.5×, 3.0×, 3.5×, 4.0×, 4.5× or 5× higher than the maintenance dose. Alternatively, or in addition, the loading dose can be administered more frequently than the maintenance dose. For example, the loading dose can be administered every day, every 2 days, every 3 days, every 4 days, or every 5 days, for at least 1, 2, 3, 4 or 5 doses, followed by a maintenance dose every week, every 10 days, every 14 days and the like. The skilled artisan will appreciate that, should the need arise, a subject who has been dosed according to the maintenance dosing schedule can be dosed again with the loading dose or doses. As a further exemplary dosing schedule, a subject can be administered loading doses on days 1 and 4, followed by weekly maintenance doses on day 8.

### Antisense Compounds

[0474] Oligomeric compounds include, but are not limited to, oligonucleotides, oligonucleosides, oligonucleotide analogs, oligonucleotide mimetics, antisense compounds, antisense oligonucleotides, and siRNAs. An oligomeric compound may be “antisense” to a target nucleic acid, meaning that is capable of undergoing hybridization to a target nucleic acid through hydrogen bonding.

[0475] In certain embodiments, an antisense compound has a nucleobase sequence that, when written in the 5′ to 3′ direction, comprises the reverse complement of the target segment of a target nucleic acid to which it is targeted. In certain such embodiments, an antisense oligonucleotide has a nucleobase sequence that, when written in the 5′ to 3′ direction, comprises the reverse complement of the target segment of a target nucleic acid to which it is targeted.

[0476] In certain embodiments antisense oligonucleotides targeted to a HBV nucleic acid may be shortened or truncated. For example, a single subunit may be deleted from the 5′ end (5′ truncation), or alternatively from the 3′ end (3′ truncation). A shortened or truncated antisense compound targeted to a HBV nucleic acid may have two subunits deleted from the 5′ end, or alternatively may have two subunits deleted from the 3′ end, of the antisense compound. Alternatively, the deleted nucleosides may be dispersed throughout the antisense compound, for example, in an antisense compound having one nucleoside deleted from the 5′ end and one nucleoside deleted from the 3′ end.

[0477] When a single additional subunit is present in a lengthened antisense compound, the additional subunit may be located at the 5′ or 3′ end of the antisense compound. When two or more additional subunits are present, the added subunits may be adjacent to each other, for example, in an antisense compound having two subunits added to the 5′ end (5′ addition), or alternatively to the 3′ end (3′ addition), of the antisense compound. Alternatively, the added subunits may be dispersed throughout the antisense compound, for example, in an antisense compound having one subunit added to the 5′ end and one subunit added to the 3′ end.

[0478] It is possible to increase or decrease the length of an antisense compound, such as an antisense oligonucleotide, and/or introduce mismatch bases without eliminating activity. For example, in Woolf et al. (Proc. Natl. Acad. Sci. USA 89:7305-7309, 1992), a series of antisense oligonucleotides 13-25 nucleobases in length were tested for their ability to induce cleavage of a target RNA in an oocyte injection model. Antisense oligonucleotides 25 nucleobases in length with 8 or 11 mismatch bases near the ends of the antisense oligonucleotides were able to direct specific cleavage of the target mRNA, albeit to a lesser extent than the antisense oligonucleotides that contained no mismatches. Similarly, target specific cleavage was achieved using 13 nucleobase antisense oligonucleotides, including those with 1 or 3 mismatches.

[0479] Gautschi et al. Natl. Cancer Inst. 93:463-471, March 2001) demonstrated the ability of an oligonucleotide having 100% complementarity to the bcl-2 mRNA and having 3 mismatches to the bc1-xL mRNA to reduce the expression of both bcl-2 and bcl-xL in vitro and in vivo. Furthermore, this oligonucleotide demonstrated potent anti-tumor activity in vivo.

[0480] Maher and Dolnick (Nuc. Acid. Res. 16:3341-3358,1988) tested a series of tandem 14 nucleobase antisense oligonucleotides, and a 28 and 42 nucleobase antisense oligonucleotides comprised of the sequence of two or three of the tandem antisense oligonucleotides, respectively, for their ability to arrest translation of human DHFR in a rabbit reticulocyte assay. Each of the three 14 nucleobase antisense oligonucleotides alone was able to inhibit translation, albeit at a more modest level than the 28 or 42 nucleobase antisense oligonucleotides.

### Antisense Compound Motifs

[0481] In certain embodiments, antisense compounds targeted to a HBV nucleic acid have chemically modified subunits arranged in patterns, or motifs, to confer to the antisense compounds properties such as enhanced inhibitory activity, increased binding affinity for a target nucleic acid, or resistance to degradation by in vivo nucleases.

[0482] Chimeric antisense compounds typically contain at least one region modified so as to confer increased resistance to nuclease degradation, increased cellular uptake, increased binding affinity for the target nucleic acid, and/or increased inhibitory activity. A second region of a chimeric antisense compound may optionally serve as a substrate for the cellular endonuclease RNase H, which cleaves the RNA strand of an RNA:DNA duplex.

[0483] Antisense compounds having a gapmer motif are considered chimeric antisense compounds. In a gapmer an internal region having a plurality of nucleotides that supports RNaseH cleavage is positioned between external regions having a plurality of nucleotides that are chemically distinct from the nucleosides of the internal region. In the case of an antisense oligonucleotide having a gapmer motif, the gap segment generally serves as the substrate for endonuclease cleavage, while the wing segments comprise modified nucleosides. In certain embodiments, the regions of a gapmer are differentiated by the types of sugar moieties comprising each distinct region. The types of sugar moieties that are used to differentiate the regions of a gapmer may in some embodiments include β-D-ribonucleosides, β-D-deoxyribonucleosides, 2′-modified nucleosides (such 2′-modified nucleosides may include 2′-MOE and 2′-O—CH₃, among others), and bicyclic sugar modified nucleosides (such bicyclic sugar modified nucleosides may include those having a constrained ethyl). In certain embodiments, nucleosides in the wings may include several modified sugar moieties, including, for example 2′-MOE and bicyclic sugar moieties such as constrained ethyl or LNA. In certain embodiments, wings may include several modified and unmodified sugar moieties. In certain embodiments, wings may include various combinations of 2′-MOE nucleosides, bicyclic sugar moieties such as constrained ethyl nucleosides or LNA nucleosides, and 2′-deoxynucleosides.

[0484] Each distinct region may comprise uniform sugar moieties, variant, or alternating sugar moieties. The wing-gap-wing motif is frequently described as “X—Y—Z”, where “X” represents the length of the 5′-wing, “Y” represents the length of the gap, and “Z” represents the length of the 3′-wing. “X” and “Z” may comprise uniform, variant, or alternating sugar moieties. In certain embodiments, “X” and “Y” may include one or more 2′-deoxynucleosides. “Y” may comprise 2′-deoxynucleosides. As used herein, a gapmer described as “X—Y—Z” has a configuration such that the gap is positioned immediately adjacent to each of the 5′-wing and the 3′ wing. Thus, no intervening nucleotides exist between the 5′-wing and gap, or the gap and the 3′-wing. Any of the antisense compounds described herein can have a gapmer motif. In certain embodiments, “X” and “Z” are the same; in other embodiments they are different. In certain embodiments, “Y” is between 8 and 15 nucleosides. X, Y, or Z can be any of 1, 2, 3, 4, 5, 6, 7, 8, 9, 10, 11, 12, 13, 14, 15, 16, 17, 18, 19, 20, 25, 30 or more nucleosides.

### Target Nucleic Acids, Target Regions and Nucleotide Sequences

[0485] In certain embodiments, nucleotide sequences that encode HBV include, without limitation, the following: GENBANK Accession U95551.1 (incorporated herein as SEQ ID NO: 1).

[0486] It is understood that the sequence set forth in each SEQ ID NO in the Examples contained herein is independent of any modification to a sugar moiety, an internucleoside linkage, or a nucleobase. As such, antisense compounds defined by a SEQ ID NO may comprise, independently, one or more modifications to a sugar moiety, an internucleoside linkage, or a nucleobase.

[0487] In certain embodiments, a target region is a structurally defined region of the target nucleic acid. For example, a target region may encompass a 3′ UTR, a 5′ UTR, an exon, an intron, an exon/intron junction, a coding region, a translation initiation region, translation termination region, or other defined nucleic acid region. The structurally defined regions for HBV can be obtained by accession number from sequence databases such as NCBI and such information is incorporated herein by reference. In certain embodiments, a target region may encompass the sequence from a 5′ target site of one target segment within the target region to a 3′ target site of another target segment within the same target region.

[0488] Targeting includes determination of at least one target segment to which an antisense compound hybridizes, such that a desired effect occurs. In certain embodiments, the desired effect is a reduction in mRNA target nucleic acid levels. In certain embodiments, the desired effect is reduction of levels of protein encoded by the target nucleic acid or a phenotypic change associated with the target nucleic acid.

[0489] A target region may contain one or more target segments. Multiple target segments within a target region may be overlapping. Alternatively, they may be non-overlapping. In certain embodiments, target segments within a target region are separated by no more than about 300 nucleotides. In certain embodiments, target segments within a target region are separated by a number of nucleotides that is, is about, is no more than, is no more than about, 250, 200, 150, 100, 90, 80, 70, 60, 50, 40, 30, 20, or 10 nucleotides on the target nucleic acid, or is a range defined by any two of the preceding values. In certain embodiments, target segments within a target region are separated by no more than, or no more than about, 5 nucleotides on the target nucleic acid. In certain embodiments, target segments are contiguous. Contemplated are target regions defined by a range having a starting nucleic acid that is any of the 5′ target sites or 3′ target sites listed herein.

[0490] Suitable target segments may be found within a 5′ UTR, a coding region, a 3′ UTR, an intron, an exon, or an exon/intron junction. Target segments containing a start codon or a stop codon are also suitable target segments. A suitable target segment may specifically exclude a certain structurally defined region such as the start codon or stop codon.

[0491] The determination of suitable target segments may include a comparison of the sequence of a target nucleic acid to other sequences throughout the genome. For example, the BLAST algorithm may be used to identify regions of similarity amongst different nucleic acids. This comparison can prevent the selection of antisense compound sequences that may hybridize in a non-specific manner to sequences other than a selected target nucleic acid (i.e., non-target or off-target sequences).

[0492] There may be variation in activity (e.g., as defined by percent reduction of target nucleic acid levels) of the antisense compounds within an active target region. In certain embodiments, reductions in HBV mRNA levels are indicative of inhibition of HBV expression. Reductions in levels of a HBV protein are also indicative of inhibition of target mRNA expression. Further, phenotypic changes are indicative of inhibition of HBV expression. In certain embodiments, reduced fatigue, reduced flu-like symptoms, increase in appetite, reduced nausea, reduced joint pain, reduced jaundice, reduced pain in the abdomen, reduced weakness, reduced weight loss, reduction in breast enlargement in men, reduced rash on the palms, reduced difficulty with blood clotting, reduced cirrhosis, reduced spider-like blood vessels on the skin, increased Vitamins A and D absorption, reduced tumor growth, reduced tumor volume, reduced headache, reduced fever, reduced diarrhea, reduced pain over the liver area of the body, reduced clay- or grey-colored stool, reduced itching, reduced dark-colored urine, and reduced nausea and vomiting can be indicative of inhibition of HBV expression, In certain embodiments, amelioration of symptoms associated with HBV-related conditions, disease, and disorders can be indicative of inhibition of HBV expression. In certain embodiments, reduction of cirrhosis is indicative of inhibition of HBV expression. In certain embodiments, reduction of liver cancer markers can be indicative of inhibition of HBV expression.

### Hybridization

[0493] In some embodiments, hybridization occurs between an antisense compound disclosed herein and a HBV nucleic acid. The most common mechanism of hybridization involves hydrogen bonding (e.g., Watson-Crick, Hoogsteen or reversed Hoogsteen hydrogen bonding) between complementary nucleobases of the nucleic acid molecules.

[0494] Hybridization can occur under varying conditions. Stringent conditions are sequence-dependent and are determined by the nature and composition of the nucleic acid molecules to be hybridized.

[0495] Methods of determining whether a sequence is specifically hybridizable to a target nucleic acid are well known in the art. In certain embodiments, the antisense compounds provided herein are specifically hybridizable with a HBV nucleic acid.

### Complementarity

[0496] An antisense compound and a target nucleic acid are complementary to each other when a sufficient number of nucleobases of the antisense compound can hydrogen bond with the corresponding nucleobases of the target nucleic acid, such that a desired effect will occur (e.g., antisense inhibition of a target nucleic acid, such as a HBV nucleic acid).

[0497] Non-complementary nucleobases between an antisense compound and a HBV nucleic acid may be tolerated provided that the antisense compound remains able to specifically hybridize to a target nucleic acid. Moreover, an antisense compound may hybridize over one or more segments of a HBV nucleic acid such that intervening or adjacent segments are not involved in the hybridization event (e.g., a loop structure, mismatch or hairpin structure).

[0498] In certain embodiments, the antisense compounds provided herein, or a specified portion thereof, are, or are at least, 70%, 80%, 85%, 86%, 87%, 88%, 89%, 90%, 91%, 92%, 93%, 94%, 95%, 96%, 97%, 98%, 99%, or 100% complementary to a HBV nucleic acid, a target region, target segment, or specified portion thereof. Percent complementarity of an antisense compound with a target nucleic acid can be determined using routine methods.

[0499] For example, an antisense compound in which 18 of 20 nucleobases of the antisense compound are complementary to a target region, and would therefore specifically hybridize, would represent 90 percent complementarity. In this example, the remaining noncomplementary nucleobases may be clustered or interspersed with complementary nucleobases and need not be contiguous to each other or to complementary nucleobases. As such, an antisense compound which is 18 nucleobases in length having four noncomplementary nucleobases which are flanked by two regions of complete complementarity with the target nucleic acid would have 77.8% overall complementarity with the target nucleic acid and would thus fall within the scope of the present invention. Percent complementarity of an antisense compound with a region of a target nucleic acid can be determined routinely using BLAST programs (basic local alignment search tools) and PowerBLAST programs known in the art (Altschul et al., J. Mol. Biol., 1990, 215, 403 410; Zhang and Madden, Genome Res., 1997, 7, 649 656). Percent homology, sequence identity or complementarity, can be determined by, for example, the Gap program (Wisconsin Sequence Analysis Package, Version 8 for Unix, Genetics Computer Group, University Research Park, Madison Wis.), using default settings, which uses the algorithm of Smith and Waterman (Adv. Appl. Math., 1981, 2, 482 489).

[0500] In certain embodiments, the antisense compounds provided herein, or specified portions thereof, are fully complementary (i.e. 100% complementary) to a target nucleic acid, or specified portion thereof. For example, an antisense compound may be fully complementary to a HBV nucleic acid, or a target region, or a target segment or target sequence thereof. As used herein, “fully complementary” means each nucleobase of an antisense compound is capable of precise base pairing with the corresponding nucleobases of a target nucleic acid. For example, a 20 nucleobase antisense compound is fully complementary to a target sequence that is 400 nucleobases long, so long as there is a corresponding 20 nucleobase portion of the target nucleic acid that is fully complementary to the antisense compound. Fully complementary can also be used in reference to a specified portion of the first and/or the second nucleic acid. For example, a 20 nucleobase portion of a 30 nucleobase antisense compound can be “fully complementary” to a target sequence that is 400 nucleobases long. The 20 nucleobase portion of the 30 nucleobase oligonucleotide is fully complementary to the target sequence if the target sequence has a corresponding 20 nucleobase portion wherein each nucleobase is complementary to the 20 nucleobase portion of the antisense compound. At the same time, the entire 30 nucleobase antisense compound may or may not be fully complementary to the target sequence, depending on whether the remaining 10 nucleobases of the antisense compound are also complementary to the target sequence.

[0501] The location of a non-complementary nucleobase may be at the 5′ end or 3′ end of the antisense compound. Alternatively, the non-complementary nucleobase or nucleobases may be at an internal position of the antisense compound. When two or more non-complementary nucleobases are present, they may be contiguous (i.e. linked) or non-contiguous. In one embodiment, a non-complementary nucleobase is located in the wing segment of a gapmer antisense oligonucleotide.

[0502] In certain embodiments, antisense compounds that are, or are up to 11, 12, 13, 14, 15, 16, 17, 18, 19, or 20 nucleobases in length comprise no more than 4, no more than 3, no more than 2, or no more than 1 non-complementary nucleobase(s) relative to a target nucleic acid, such as a HBV nucleic acid, or specified portion thereof. In certain embodiments, antisense compounds that are, or are up to 11, 12, 13, 14, 15, 16, 17, 18, 19, 20, 21, 22, 23, 24, 25, 26, 27, 28, 29, or 30 nucleobases in length comprise no more than 6, no more than 5, no more than 4, no more than 3, no more than 2, or no more than 1 non-complementary nucleobase(s) relative to a target nucleic acid, such as a HBV nucleic acid, or specified portion thereof.

[0503] The antisense compounds provided also include those which are complementary to a portion of a target nucleic acid. As used herein, “portion” refers to a defined number of contiguous (i:e. linked) nucleobases within a region or segment of a target nucleic acid. A “portion” can also refer to a defined number of contiguous nucleobases of an antisense compound. In certain embodiments, the antisense compounds, are complementary to at least an 8 nucleobase portion of a target segment. In certain embodiments, the antisense compounds are complementary to at least a 9 nucleobase portion of a target segment. In certain embodiments, the antisense compounds are complementary to at least a 10 nucleobase portion of a target segment. In certain embodiments, the antisense compounds are complementary to at least an 11 nucleobase portion of a target segment. In certain embodiments, the antisense compounds are complementary to at least a 12 nucleobase portion of a target segment. In certain embodiments, the antisense compounds are complementary to at least a 13 nucleobase portion of a target segment. In certain embodiments, the antisense compounds are complementary to at least a 14 nucleobase portion of a target segment. In certain embodiments, the antisense compounds are complementary to at least a 15 nucleobase portion of a target segment. Also contemplated are antisense compounds that are complementary to at least a 9, 10, 11, 12, 13, 14, 15, 16, 17, 18, 19, 20, or more nucleobase portion of a target segment, or a range defined by any two of these values.

### Identity

[0504] The antisense compounds provided herein may also have a defined percent identity to a particular nucleotide sequence, SEQ ID NO, or compound, or portion thereof. As used herein, an antisense compound is identical to the sequence disclosed herein if it has the same nucleobase pairing ability. For example, a RNA which contains uracil in place of thymidine in a disclosed DNA sequence would be considered identical to the DNA sequence since both uracil and thymidine pair with adenine. Shortened and lengthened versions of the antisense compounds described herein as well as compounds having non-identical bases relative to the antisense compounds provided herein also are contemplated. The non-identical bases may be adjacent to each other or dispersed throughout the antisense compound. Percent identity of an antisense compound is calculated according to the number of bases that have identical base pairing relative to the sequence to which it is being compared.

[0505] As used herein, “complementary” polynucleotides are those that are capable of base pairing according to the standard Watson-Crick complementarity rules. Specifically, purines will base pair with pyrimidines to form a combination of guanine paired with cytosine (G: C) and adenine paired with either thymine (A: T) in the case of DNA, or adenine paired with uracil (A: U) in the case of RNA. For example, the sequence “A-G-T” binds to the complementary sequence “T-C-A.” It is understood that two polynucleotides may hybridize to each other even if they are not completely complementary to each other, provided that each has at least one region that is substantially complementary to the other.

[0506] As used herein, the terms “substantially complementary” or “partially complementary” mean that two nucleic acid sequences are complementary at least at about 50%, 60%, 70%, 80% or 90% of their nucleotides.

[0507] In some embodiments, the two nucleic acid sequences can be complementary at least at 85%, 90%, 95%, 96%, 97%, 98%, 99% or more of their nucleotides. In some embodiments, the two nucleic acid sequences can be between 60% to 100% complementary, between 70% to 100% complementary, between 80% and 100% complementary, between 90% and 100% complementary, between 60% to 90% complementary, between 60% to 80% complementary, between 60% and 70% complementary, between 70% and 90% complementary, between 70% and 80% complementary, between 80% and 100% complementary, or between 80% and 90% complementary.

[0508] The terms “substantially complementary” and “partially complementary” can also mean that two nucleic acid sequences can hybridize under high stringency conditions, and such conditions are well known in the art.

[0509] As used herein, the term “identity” means that sequences are compared with one another as follows. In order to determine the percentage identity of two nucleic acid sequences, the sequences can first be aligned with respect to one another in order subsequently to make a comparison of these sequences possible. For this e.g. gaps can be inserted into the sequence of the first nucleic acid sequence and the nucleotides can be compared with the corresponding position of the second nucleic acid sequence. If a position in the first nucleic acid sequence is occupied by the same nucleotide as is the case at a position in the second sequence, the two sequences are identical at this position. The percentage identity between two sequences is a function of the number of identical positions divided by the number of all the positions compared in the sequences investigated.

[0510] A “percent identity” for aligned segments of a test sequence and a reference sequence is the percent of identical components which are shared by the two aligned sequences divided by the total number of components in reference sequence segment, i.e., the entire reference sequence or a smaller defined part of the reference sequence.

[0511] The percentage identity of two sequences can be determined with the aid of a mathematical algorithm. A preferred, but not limiting, example of a mathematical algorithm which can be used for comparison of two sequences is the algorithm of Karlin et al. (1993), PNAS USA, 90:5873-5877. Such an algorithm is integrated in the NBLAST program, with which sequences which have a desired identity to the sequences of the present invention can be identified. In order to obtain a gapped alignment, as described here, the “Gapped BLAST” program can be used, as is described in Altschul et al. (1997), Nucleic Acids Res, 25:3389-3402. If BLAST and Gapped BLAST programs are used, the preset parameters of the particular program (e.g. NBLAST) can be used. The sequences can be aligned further using version 9 of GAP (global alignment program) of the “Genetic Computing Group” using the preset (BLOSUM62) matrix (values −4 to +11) with a gap open penalty of −12 (for the first zero of a gap) and a gap extension penalty of −4 (for each additional successive zero in the gap). After the alignment, the percentage identity is calculated by expressing the number of agreements as a percentage content of the nucleic acids in the sequence claimed. The methods described for determination of the percentage identity of two nucleic acid sequences can also be used correspondingly, if necessary, on the coded amino acid sequences.

[0512] Useful methods for determining sequence identity are also disclosed in Guide to Huge Computers (Martin J. Bishop, ed., Academic Press, San Diego (1994)), and Carillo, H., and Lipton, D., (Applied Math48: 1073 (1988)). More particularly, preferred computer programs for determining sequence identity include but are not limited to the Basic Local Alignment Search Tool (BLAST) programs which are publicly available from National Center Biotechnology Information (NCBI) at the National Library of Medicine, National Institute of Health, Bethesda, Md. 20894; see BLAST Manual, Altschul et al., NCBI, NLM, NIH; (Altschul et al., J. Mol. Biol. 215:403-410 (1990)); version 2.0 or higher of BLAST programs allows the introduction of gaps (deletions and insertions) into alignments; for peptide sequence BLASTX can be used to determine sequence identity; and, for polynucleotide sequence BLASTN can be used to determine sequence identity. Percent identity can be 70% identity or greater, e.g., at least 70% identity, at least 75% identity, at least 80% identity, at least 85% identity, at least 90% identity, at least 95% identity, at least 98% identity, at least 99% identity or 100% identity.

### Modifications

[0513] A nucleoside is a base-sugar combination. The nucleobase (also known as base) portion of the nucleoside is normally a heterocyclic base moiety. Nucleotides are nucleosides that further include a phosphate group covalently linked to the sugar portion of the nucleoside. For those nucleosides that include a pentofuranosyl sugar, the phosphate group can be linked to the 2′, 3′ or 5′ hydroxyl moiety of the sugar. Oligonucleotides are formed through the covalent linkage of adjacent nucleosides to one another, to form a linear polymeric oligonucleotide. Within the oligonucleotide structure, the phosphate groups are commonly referred to as forming the internucleoside linkages of the oligonucleotide.

[0514] Modifications to antisense compounds encompass substitutions or changes to internucleoside linkages, sugar moieties, or nucleobases. Modified antisense compounds are often preferred over native forms because of desirable properties such as, for example, enhanced cellular uptake, enhanced affinity for nucleic acid target, increased stability in the presence of nucleases, or increased inhibitory activity.

[0515] Chemically modified nucleosides may also be employed to increase the binding affinity of a shortened or truncated antisense oligonucleotide for its target nucleic acid. Consequently, comparable results can often be obtained with shorter antisense compounds that have such chemically modified nucleosides.

### Modified Internucleoside Linkages

[0516] The naturally occurring internucleoside linkage of RNA and DNA is a 3′ to 5′ phosphodiester linkage. Antisense compounds having one or more modified, i.e. non-naturally occurring, internucleoside linkages are often selected over antisense compounds having naturally occurring internucleoside linkages because of desirable properties such as, for example, enhanced cellular uptake, enhanced affinity for target nucleic acids, and increased stability in the presence of nucleases.

[0517] Oligonucleotides having modified internucleoside linkages include internucleoside linkages that retain a phosphorus atom as well as internucleoside linkages that do not have a phosphorus atom. Representative phosphorus containing internucleoside linkages include, but are not limited to, phosphodiesters, phosphotriesters, methylphosphonates, phosphoramidate, and phosphorothioates. Methods of preparation of phosphorous-containing and non-phosphorous-containing linkages are well known.

[0518] In certain embodiments, antisense compounds targeted to a HBV nucleic acid comprise one or more modified internucleoside linkages. In certain embodiments, the modified internucleoside linkages are phosphorothioate linkages. In certain embodiments, each internucleoside linkage of an antisense compound is a phosphorothioate internucleoside linkage.

### Modified Sugar Moieties

[0519] Antisense compounds provided herein can optionally contain one or more nucleosides wherein the sugar group has been modified. Such sugar modified nucleosides may impart enhanced nuclease stability, increased binding affinity, or some other beneficial biological property to the antisense compounds. In certain embodiments, nucleosides comprise a chemically modified ribofuranose ring moiety. Examples of chemically modified ribofuranose rings include, without limitation, addition of substituent groups (including 5′ and 2′ substituent groups); bridging of non-geminal ring atoms to form bicyclic nucleic acids (BNA); replacement of the ribosyl ring oxygen atom with S, N(R), or C(R¹) (R²) (R═H, C₁-C₁₂ alkyl or a protecting group); and combinations thereof. Examples of chemically modified sugars include, 2′-F-5′-methyl substituted nucleoside (see, PCT International Application WO 2008/101157, published on Aug. 21, 2008 for other disclosed 5′, 2′-bis substituted nucleosides), replacement of the ribosyl ring oxygen atom with S with further substitution at the 2′-position (see, published U.S. Patent Application US2005/0130923, published on Jun. 16, 2005), or, alternatively, 5′-substitution of a BNA (see, PCT International Application WO 2007/134181, published on Nov. 22, 2007, wherein LNA is substituted with, for example, a 5′-methyl or a 5′-vinyl group).

[0520] Examples of nucleosides having modified sugar moieties include, without limitation, nucleosides comprising 5′-vinyl, 5′-methyl (R or S), 4′-S, 2′-F, 2′—OCH₃, and 2′-O(CH₂)₂OCH₃ substituent groups. The substituent at the 2′ position can also be selected from allyl, amino, azido, thio, O-allyl, O—C₁-C₁₀ alkyl, OCF₃, O(CH₂)₂SCH₃, O(CH₂)₂—O—N(R^{m}) (Rⁿ), and O—CH₂—C(═O)—N(R^{m}) (Rⁿ), where each R^{m} and Rⁿ is, independently, H or substituted or unsubstituted C₁-C₁₀ alkyl.

[0521] As used herein, “bicyclic nucleosides” refer to modified nucleosides comprising a bicyclic sugar moiety. Examples of bicyclic nucleosides include, without limitation, nucleosides comprising a bridge between the 4′ and the 2′ ribosyl ring atoms. In certain embodiments, antisense compounds provided herein include one or more bicyclic nucleosides wherein the bridge comprises a 4′ to 2′ bicyclic nucleoside. Examples of such 4′ to 2′ bicyclic nucleosides, include, but are not limited to, one of the formulae: 4′-(CH₂)—O-2′ (LNA); 4′-(CH₂)—S-2; 4′—(CH₂)₂—O-2′ (ENA); 4′-CH(CH₃)—O-2′ (cEt) and 4′-CH(CH₂OCH₃)—O-2′, and analogs thereof (see, U.S. Pat. No. 7,399,845, issued on Jul. 15, 2008); 4′-C(CH₃) (CH₃)—O-2′, and analogs thereof (see, published PCT International Application WO2009/006478, published Jan. 8, 2009); 4′-CH₂—N(OCH₃)-2′, and analogs thereof (see, published PCT International Application WO2008/150729, published Dec. 11, 2008); 4′-CH₂—O—N(CH₃)-2′ (see, published U.S. Patent Application US2004/0171570, published Sep. 2, 2004); 4′-CH₂—N(R)—O-2′, wherein R is H, C₁-C₁₂ alkyl, or a protecting group (see, U.S. Pat. No. 7,427,672, issued on Sep. 23, 2008); 4′-CH₂—C(H) (CH₃)-2′ (see, Chattopadhyaya, et al., J. Org. Chem., 2009, 74, 118-134); and 4′-CH₂—C(═CH₂)-2′, and analogs thereof (see, published PCT International Application WO 2008/154401, published on Dec. 8, 2008). Also see, for example: Singh et al., Chem. Commun., 1998, 4, 455-456; Koshkin et al., Tetrahedron, 1998, 54, 3607-3630; Wahlestedt et al., Proc. Natl. Acad. Sci. U.S.A, 2000, 97, 5633-5638; Kumar et al., Bioorg. Med. Chem. Lett., 1998, 8, 2219-2222; Singh et al., J. Org. Chem., 1998, 63, 10035-10039; Srivastava et al., J. Am. Chem. Soc., 129 (26) 8362-8379 (Jul. 4, 2007); Elayadi et al., Curr. Opinion Invens. Drugs, 2001, 2, 558-561; Braasch et al., Chem. Biol., 2001, 8, 1-7; Orum et al., Curr. Opinion Mol. Ther., 2001, 3, 239-243; U.S. Pat. Nos. 6,670,461, 7,053,207, 6,268,490, 6,770,748, 6,794,499, 7,034, 133, 6,525,191, 7,399,845; published PCT International applications WO 2004/106356, WO 94/14226, WO 2005/021570, and WO 2007/134181; U.S. Patent Publication Nos. US2004/0171570, US2007/0287831, and US2008/0039618; and U.S. patents Ser. Nos. 12/129,154, 60/989,574, 61/026,995, 61/026,998, 61/056,564, 61/086,231, 61/097,787, and 61/099,844; and PCT International Application Nos. PCT/US2008/064591, PCT/US2008/066154, and PCT/US2008/068922. Each of the foregoing bicyclic nucleosides can be prepared having one or more stereochemical sugar configurations including for example α-L-ribofuranose and β-D-ribofuranose (see PCT international application PCT/DK98/00393, published on Mar. 25, 1999 as WO 99/14226).

[0522] In certain embodiments, bicyclic sugar moieties of BNA nucleosides include, but are not limited to, compounds having at least one bridge between the 4′ and the 2′ position of the pentofuranosyl sugar moiety wherein such bridges independently comprises 1 or from 2 to 4 linked groups independently selected from —[C(R^{a}) (R^{b})]ₙ—, —C(R^{a})═C(R^{b})—, —C(R^{a})═N—, —C(═NR^{a})—, —C(═O)—, —C(═S)—, —O—, —Si(R^{a})₂—, —S(═O)ₓ—, and —N(R^{a})—;
[0523] wherein:
[0524] x is 0, 1, or 2;
[0525] n is 1, 2, 3, or 4;
[0526] each R^{a} and R^{b} is, independently, H, a protecting group, hydroxyl, C₁-C₁₂ alkyl, substituted C₁-C₁₂ alkyl, C₂-C₁₂ alkenyl, substituted C₂-C₁₂ alkenyl, C₂-C₁₂ alkynyl, substituted C₂-C₁₂ alkynyl, C₅-C₂₀ aryl, substituted C₅-C₂₀ aryl, heterocycle radical, substituted heterocycle radical, heteroaryl, substituted heteroaryl, C₅-C₇ alicyclic radical, substituted C₅-C₇ alicyclic radical, halogen, OJ¹, NJ¹J², SJ¹, N₃, COOJ¹, acyl (C(═O)—H), substituted acyl, CN, sulfonyl (S(═O)₂-J¹), or sulfoxyl (S(═O)-J¹); and
[0527] each J¹ and J² is, independently, H, C₁-C₁₂ alkyl, substituted C₁-C₁₂ alkyl, C₂-C₁₂ alkenyl, substituted C₂-C₁₂ alkenyl, C₂-C₁₂ alkynyl, substituted C₂-C₁₂ alkynyl, C₅-C₂₀ aryl, substituted C₅-C₂₀ aryl, acyl (C(═O)—H), substituted acyl, a heterocycle radical, a substituted heterocycle radical, C₁-C₁₂ aminoalkyl, substituted C₁-C₁₂ aminoalkyl, or a protecting group.

[0528] In certain embodiments, the bridge of a bicyclic sugar moiety is, —[C(R^{a}) (R^{b})]ₙ—, [C(R^{a}) (R^{b})]ₙ—O—, —C(R^{a}) (R^{b})—N(R)—O— or, —C(R³) (R^{b})—O—N(R)—. In certain embodiments, the bridge is 4′-CH₂-2′, 4′—(CH₂)₂-2′, 4′—(CH₂)₃-2′, 4′—CH₂—O-2′, 4′—(CH₂)₂—O-2′, 4′—CH₂—O—N(R)-2′, and 4′-CH₂—N(R)—O-2′-, wherein each R is, independently, H, a protecting group, or C₁-C₁₂ alkyl.

[0529] In certain embodiments, bicyclic nucleosides are further defined by isomeric configuration. For example, a nucleoside comprising a 4′-2′ methylene-oxy bridge, may be in the α-L configuration or in the β-D configuration. Previously, α-L-methyleneoxy (4′-CH₂—O-2′) BNAs have been incorporated into antisense oligonucleotides that showed antisense activity (Frieden et al., Nucleic Acids Research, 2003, 21, 63 6563 72).

[0530] In certain embodiments, bicyclic nucleosides include, but are not limited to, (A) α-L-Methyleneoxy (4′-CH₂—O-2′) BNA, (B) β-D-Methyleneoxy (4′-CH₂—O-2′) BNA, (C) Ethyleneoxy (4′-(CH₂)₂—O-2′) BNA, (D) Aminooxy (4′-CH₂—O—N(R)-2′) BNA, (E) Oxyamino (4′-CH₂—N(R)—O-2′) BNA, (F) Methyl (methyleneoxy) (4′-CH(CH₃)—O-2′) BNA, (G) methylene-

[chemical structure]

[chemical structure]

thio (4′-CH₂—S-2′) BNA, (H) methylene-amino (4′-CH₂—N(R)-2′) BNA, (I) methyl carbocyclic (4′-CH₂—CH(CH₃)-2′) BNA, and (J) propylene carbocyclic (4′-(CH₂)₃-2′) BNA as depicted below.
wherein Bx is the base moiety and R is, independently, H, a protecting group or C₁-C₁₂ alkyl.

[0531] In certain embodiments, the bicyclic nucleoside is according to Formula I:

[chemical structure]

[0532] wherein:
[0533] Bx is a heterocyclic base moiety;
[0534] -Q^{a}-Q^{b}-Q^{c}- is —CH₂—N(R^{c})—CH₂—, —C(═O)—N(R^{c})—CH₂—, —CH₂—O—N(R^{c})—, —CH₂—N(R^{c})—O—, or —N(R^{c})—O—CH₂;
[0535] R^{c} is C₁-C₁₂ alkyl or an amino protecting group; and
[0536] T^{a} and T^{b} are each, independently, H, a hydroxyl protecting group, a conjugate group, a reactive phosphorus group, a phosphorus moiety, or a covalent attachment to a support medium.

[0537] In certain embodiments, bicyclic nucleoside having Formula II:

[chemical structure]

[0538] wherein:
[0539] Bx is a heterocyclic base moiety;
[0540] T^{a} and T^{b} are each, independently, H, a hydroxyl protecting group, a conjugate group, a reactive phosphorus group, a phosphorus moiety, or a covalent attachment to a support medium;
[0541] Zₐ is C₁-C₆ alkyl, C₂-C₆ alkenyl, C₂-C₆ alkynyl, substituted C₁-C₆ alkyl, substituted C₂-C₆ alkenyl, substituted C₂-C₆ alkynyl, acyl, substituted acyl, substituted amide, thiol, or substituted thio.

[0542] In one embodiment, each of the substituted groups is, independently, mono or poly substituted with substituent groups independently selected from halogen, oxo, hydroxyl, OJ^{c}, NJ^{c}J^{d}, SJ^{c}, N₃, OC(═X)J^{c}, and NJ^{c}C(═X) NJ^{c}J^{d}, wherein each J^{c}, J^{d}, and J^{e} is, independently, H, C₁-C₆ alkyl, or substituted C₁-C₆ alkyl and X is 0 or NJ^{c}.

[0543] In certain embodiments, bicyclic nucleoside having Formula III:

[chemical structure]

[0544] wherein:
[0545] Bx is a heterocyclic base moiety;
[0546] T^{a} and T^{b} are each, independently, H, a hydroxyl protecting group, a conjugate group, a reactive phosphorus group, a phosphorus moiety, or a covalent attachment to a support medium;
[0547] Z^{b} is C₁-C₆ alkyl, C₂-C₆ alkenyl, C₂-C₆ alkynyl, substituted C₁-C₆ alkyl, substituted C₂-C₆ alkenyl, substituted C₂-C₆ alkynyl, or substituted acyl (C(═O)—).

[0548] In certain embodiments, bicyclic nucleoside having Formula IV:

[chemical structure]

[0549] wherein:
[0550] Bx is a heterocyclic base moiety;
[0551] T^{a} and T^{b} are each, independently H, a hydroxyl protecting group, a conjugate group, a reactive phosphorus group, a phosphorus moiety, or a covalent attachment to a support medium;
[0552] R^{d} is C₁-C₆ alkyl, substituted C₁-C₆ alkyl, C₂-C₆ alkenyl, substituted C₂-C₆ alkenyl, C₂-C₆ alkynyl, or substituted C₂-C₆ alkynyl;
[0553] each q^{a}, q^{b}, q^{c} and q^{d} is, independently, H, halogen, C₁-C₆ alkyl, substituted C₁-C₆ alkyl, C₂-C₆ alkenyl, substituted C₂-C₆ alkenyl, C₂-C₆ alkynyl, or substituted C₂-C₆ alkynyl, C₁-C₆ alkoxyl, substituted C₁-C₆ alkoxyl, acyl, substituted acyl, C₁-C₆ aminoalkyl, or substituted C₁-C₆ aminoalkyl;

[0554] In certain embodiments, bicyclic nucleoside having Formula V:

[chemical structure]

[0555] wherein:
[0556] Bx is a heterocyclic base moiety;
[0557] T^{a} and T^{b} are each, independently, H, a hydroxyl protecting group, a conjugate group, a reactive phosphorus group, a phosphorus moiety, or a covalent attachment to a support medium;
[0558] q^{a}, q^{b}, q^{e} and q^{f} are each, independently, hydrogen, halogen, C₁-C₁₂ alkyl, substituted C₁-C₁₂ alkyl, C₂-C₁₂ alkenyl, substituted C₂-C₁₂ alkenyl, C₂-C₁₂ alkynyl, substituted C₂-C₁₂ alkynyl, C₁-C₁₂ alkoxy, substituted C₁-C₁₂ alkoxy, OJ^{j}, SJ^{j}, SOJ^{j}, SO₂J^{j}, NJ^{j}J^{k}, N₃, CN, C(═O) OJ^{j}, C(═O)NJ^{j}J^{k}, C(═O)J^{j}, O—C(═O)NJ^{j}J^{k}, N(H)C(═NH)NJ^{j}J^{k}, N(H)C(═O) NJ^{j}J^{k} or N(H)C(═S)NJ^{j}J^{k};
[0559] or q^{e} and q^{f} together are ═C(q^{g})(q^{h});
[0560] q^{g} and q^{h} are each, independently, H, halogen, C₁-C₁₂ alkyl, or substituted C₁-C₁₂ alkyl.

[0561] The synthesis and preparation of the methyleneoxy (4′-CH₂—O-2′) BNA monomers adenine, cytosine, guanine, 5-methyl-cytosine, thymine, and uracil, along with their oligomerization, and nucleic acid recognition properties have been described (see, e.g., Koshkin et al., Tetrahedron, 1998, 54, 3607-3630). BNAs and preparation thereof are also described in WO 98/39352 and WO 99/14226.

[0562] Analogs of methyleneoxy (4′-CH₂—O-2′) BNA, methyleneoxy (4′-CH₂—O-2′) BNA, and 2′-thio-BNAs, have also been prepared (see, e.g., Kumar et al., Bioorg. Med. Chem. Lett., 1998, 8, 2219-2222). Preparation of locked nucleoside analogs comprising oligodeoxyribonucleotide duplexes as substrates for nucleic acid polymerases has also been described (see, e.g., Wengel et al., WO 99/14226). Furthermore, synthesis of 2′-amino-BNA, a novel conformationally restricted high-affinity oligonucleotide analog, has been described in the art (see, e.g., Singh et al., J. Org. Chem., 1998, 63, 10035-10039). In addition, 2′-amino- and 2′-methylamino-BNA's have been prepared and the thermal stability of their duplexes with complementary RNA and DNA strands has been previously reported.

[0563] In certain embodiments, bicyclic nucleoside having Formula VI:

[chemical structure]

[0564] wherein:
[0565] Bx is a heterocyclic base moiety;
[0566] T^{a} and T^{b} are each, independently, H, a hydroxyl protecting group, a conjugate group, a reactive phosphorus group, a phosphorus moiety, or a covalent attachment to a support medium;
[0567] each qⁱ, q^{j}, q^{k} and q^{l} is, independently, H, halogen, C₁-C₁₂ alkyl, substituted C₁-C₁₂ alkyl, C₂-C₁₂ alkenyl, substituted C₂-C₁₂ alkenyl, C₂-C₁₂ alkynyl, substituted C₂-C₁₂ alkynyl, C₁-C₁₂ alkoxyl, substituted C₁-C₁₂ alkoxyl, OJ^{j}, SJ^{j}, SOJ^{j}, SO₂J^{j}, NJ^{j}J^{k}, N₃, CN, C(═O) OJ^{j}, C(═O)NJ^{j}J^{k}, C(═O)J^{j}, O—C(═O)NJ^{j}J^{k}, N(H)C(═NH)NJ^{j}J^{k}, N(H)C(═O)NJ^{j}J^{k}, or N(H)C(═S)NJ^{j}J^{k}; and
[0568] qⁱ and q^{j} or q^{l} and q^{k} together are ═C(q^{g})(q^{h}), wherein q^{g} and q^{h}, are each, independently, H, halogen, C₁-C₁₂ alkyl, or substituted C₁-C₁₂ alkyl.

[0569] One carbocyclic bicyclic nucleoside having a 4′-(CH₂)₃-2′ bridge and the alkenyl analog, bridge 4′—CH═CH—CH₂-2′, have been described (see, e.g., Freier et al., Nucleic Acids Research, 1997, 25 (22), 44294443 and Albaek et al., J. Org. Chem., 2006, 71, 7731-7740). The synthesis and preparation of carbocyclic bicyclic nucleosides along with their oligomerization and biochemical studies have also been described (see, e.g., Srivastava et al., J. Am. Chem. Soc. 2007, 129 (26), 8362-8379).

[0570] As used herein, “bicyclic nucleoside” refers to a nucleoside comprising a bridge connecting two carbon atoms of the sugar ring, thereby forming a bicyclic sugar moiety. In certain embodiments, the bridge connects the 2′ carbon and another carbon of the sugar ring.

[0571] As used herein, “4′-2′ bicyclic nucleoside” or “4′ to 2′ bicyclic nucleoside” refers to a bicyclic nucleoside comprising a furanose ring comprising a bridge connecting the 2′ carbon atom and the 4′ carbon atom.

[0572] As used herein, “monocyclic nucleosides” refer to nucleosides comprising modified sugar moieties that are not bicyclic sugar moieties. In certain embodiments, the sugar moiety, or sugar moiety analogue, of a nucleoside may be modified or substituted at any position.

[0573] As used herein, “2′-modified sugar” means a furanosyl sugar modified at the 2′ position. In certain embodiments, such modifications include substituents selected from: a halide, including, but not limited to substituted and unsubstituted alkoxy, substituted and unsubstituted thioalkyl, substituted and unsubstituted amino alkyl, substituted and unsubstituted alkyl, substituted and unsubstituted allyl, and substituted and unsubstituted alkynyl. In certain embodiments, 2′ modifications are selected from substituents including, but not limited to: O[(CH₂), O]ₘCH₃, O(CH₂)ₙNH₂, O(CH₂), CH₃, O(CH₂)ₙONH₂, OCH₂C(═O) N(H) CH₃, and O(CH₂)ₙON[(CH₂), CH₃]₂, where n and m are from 1 to about 10. Other 2′-substituent groups can also be selected from: C₁-C₁₂ alkyl; substituted alkyl; alkenyl; alkynyl; alkaryl; aralkyl; O-alkaryl or O-aralkyl; SH; SCH₃; OCN; Cl; Br; CN; CF₃; OCF₃; SOCH₃; SO₂CH₃; ONO₂; NO₂; N₃; NH₂; heterocycloalkyl; heterocycloalkaryl; aminoalkylamino; polyalkylamino; substituted silyl; an RNA cleaving group; a reporter group; an intercalator; a group for improving pharmacokinetic properties; and a group for improving the pharmacodynamic properties of an antisense compound, and other substituents having similar properties. In certain embodiments, modified nucleosides comprise a 2′-MOE side chain (see, e.g., Baker et al., J. Biol. Chem., 1997, 272, 11944-12000). Such 2′-MOE substitution have been described as having improved binding affinity compared to unmodified nucleosides and to other modified nucleosides, such as 2′-O-methyl, O-propyl, and O-aminopropyl. Oligonucleotides having the 2′-MOE substituent also have been shown to be antisense inhibitors of gene expression with promising features for in vivo use (see, e.g., Martin, P., Helv. Chim. Acta, 1995, 78, 486-504; Altmann et al., Chimia, 1996, 50, 168-176; Altmann et al., Biochem. Soc. Trans., 1996, 24, 630-637; and Altmann et al., Nucleosides Nucleotides, 1997, 16, 917-926).

[0574] As used herein, a “modified tetrahydropyran nucleoside” or “modified THP nucleoside” means a nucleoside having a six-membered tetrahydropyran “sugar” substituted in for the pentofuranosyl residue in normal nucleosides (a sugar surrogate). Modified THP nucleosides include, but are not limited to, what is referred to in the art as hexitol nucleic acid (HNA), anitol nucleic acid (ANA), mannitol nucleic acid (MNA) (see Leumann, CJ. Bioorg. & Med. Chem. (2002) 10:841-854), fluoro HNA (F-HNA), or those compounds having Formula X: wherein independently for each of said at least one tetrahydropyran nucleoside analog of Formula X:

[chemical structure]

[0575] Bx is a heterocyclic base moiety;
[0576] T³ and T⁴ are each, independently, an internucleoside linking group linking the tetrahydropyran nucleoside analog to the antisense compound or one of T³ and T⁴ is an internucleoside linking group linking the tetrahydropyran nucleoside analog to the antisense compound and the other of T³ and T⁴ is H, a hydroxyl protecting group, a linked conjugate group, or a 5′ or 3′-terminal group;
[0577] q¹, q², q³, q⁴, q⁵, q⁶, and q⁷ are each, independently, H, C₁-C₆ alkyl, substituted C₁-C₆ alkyl, C₂-C₆ alkenyl, substituted C₂-C₆ alkenyl, C₂-C₆ alkynyl, or substituted C₂-C₆ alkynyl; and
[0578] one of R¹ and R² is hydrogen and the other is selected from halogen, substituted or unsubstituted alkoxy, NJ¹J², SJ¹, N₃, OC(═X) J¹, OC(═X) NJ¹J², NJ³C(═X) NJ¹J², and CN, wherein X is O, S, or NJ¹, and each J¹, J², and J³ is, independently, H or C₁-C₆ alkyl.

[0579] In certain embodiments, the modified THP nucleosides of Formula X are provided wherein q^{m}, qⁿ, q^{p}, q^{r}, q^{s}, q^{t}, and q^{u} are each H. In certain embodiments, at least one of q^{m}, qⁿ, q^{p}, q^{r}, q^{s}, q^{t}, and q^{u} is other than H. In certain embodiments, at least one of q^{m}, qⁿ, q^{p}, q^{r}, q^{s}, q^{t}, and q^{u} is methyl. In certain embodiments, THP nucleosides of Formula X are provided wherein one of R¹ and R² is F. In certain embodiments, R¹ is fluoro and R² is H, R¹ is methoxy and R² is H, and R¹ is methoxyethoxy and R² is H.

[0580] As used herein, “2′-modified nucleoside” or “2′-substituted nucleoside” refers to a nucleoside comprising a sugar comprising a substituent at the 2′ position of a furanose ring other than H or OH. 2′-modified nucleosides, include, but are not limited to, bicyclic nucleosides wherein the bridge connecting two carbon atoms of the sugar ring connects the 2′ carbon and another carbon of the sugar ring and nucleosides with non-bridging 2′-substituents, such as allyl, amino, azido, thio, O-allyl, O—C₁-C₁₀ alkyl, —OCF₃, O—(CH₂)₂—OCH₃, 2′-O(CH₂)₂SCH₃, O—(CH₂)₂—O—N(R^{m}) (Rⁿ), or O—CH₂—C(═O)—N(R^{m})(Rⁿ), where each R^{m} and Rⁿ is, independently, H or substituted or unsubstituted C₁-C₁₀ alkyl. 2′-modified nucleosides may further comprise other modifications, for example, at other positions of the sugar and/or at the nucleobase.

[0581] As used herein, “2′-F” refers to a sugar comprising a fluoro group at the 2′ position.

[0582] As used herein, “2′-OMe” or “2′—OCH₃” or “2′-O-methyl” each refers to a nucleoside comprising a sugar comprising an —OCH₃ group at the 2′ position of the sugar ring.

[0583] As used herein, “oligonucleotide” refers to a compound comprising a plurality of linked nucleosides. In certain embodiments, one or more of the plurality of nucleosides is modified. In certain embodiments, an oligonucleotide comprises one or more ribonucleosides (RNA) and/or deoxyribonucleosides (DNA).

[0584] Many other bicyclo and tricyclo sugar surrogate ring systems are also known in the art that can be used to modify nucleosides for incorporation into antisense compounds (see, e.g., review article: Leumann, J. C, Bioorganic & Medicinal Chemistry, 2002, 10, 841-854). Such ring systems can undergo various additional substitutions to enhance activity.

[0585] Methods for the preparations of modified sugars are well known to those skilled in the art.

[0586] In nucleotides having modified sugar moieties, the nucleobase moieties (natural, modified, or a combination thereof) are maintained for hybridization with an appropriate nucleic acid target.

[0587] In certain embodiments, antisense compounds comprise one or more nucleotides having modified sugar moieties. In certain embodiments, the modified sugar moiety is 2′-MOE. In certain embodiments, the 2′-MOE modified nucleotides are arranged in a gapmer motif. In certain embodiments, the modified sugar moiety is a cEt. In certain embodiments, the cEt modified nucleotides are arranged throughout the wings of a gapmer motif.

### Compositions and Methods for Formulating Pharmaceutical Compositions

[0588] Antisense oligonucleotides may be admixed with pharmaceutically acceptable active or inert substances for the preparation of pharmaceutical compositions or formulations. Compositions and methods for the formulation of pharmaceutical compositions arc dependent upon a number of criteria, including, but not limited to, route of administration, extent of disease, or dose to be administered.

[0589] An antisense compound targeted to a HBV nucleic acid can be utilized in pharmaceutical compositions by combining the antisense compound with a suitable pharmaceutically acceptable diluent or carrier. A pharmaceutically acceptable diluent includes phosphate-buffered saline (PBS). PBS is a diluent suitable for use in compositions to be delivered parenterally. Accordingly, in one embodiment, employed in the methods described herein is a pharmaceutical composition comprising an antisense compound targeted to a HBV nucleic acid and a pharmaceutically acceptable diluent. In certain embodiments, the pharmaceutically acceptable diluent is PBS. In certain embodiments, the antisense compound is an antisense oligonucleotide.

[0590] Pharmaceutical compositions comprising antisense compounds encompass any pharmaceutically acceptable salts, esters, or salts of such esters, or any other oligonucleotide which, upon administration to an animal, including a human, is capable of providing (directly or indirectly) the biologically active metabolite or residue thereof. Accordingly, for example, the disclosure is also drawn to pharmaceutically acceptable salts of antisense compounds, prodrugs, pharmaceutically acceptable salts of such prodrugs, and other bioequivalents. Suitable pharmaceutically acceptable salts include, but are not limited to, sodium and potassium salts.

[0591] A prodrug can include the incorporation of additional nucleosides at one or both ends of an antisense compound which are cleaved by endogenous nucleases within the body, to form the active antisense compound.

[0592] The disclosure provides pharmaceutical compositions comprising the modified oligonucleotides of the disclosure and a pharmaceutically acceptable carrier, diluent or excipient. In some embodiments, the modified oligonucleotide comprises a sequence of any one SEQ ID NOS: 11-666. In some embodiments, the modified oligonucleotide comprises a sequence of any one SEQ ID NOS: 11-666, and 1, 2, 3, 4, or 5 modifications thereto, as described herein.

[0593] Modified oligonucleotides may be admixed with pharmaceutically acceptable active or inert substances for the preparation of pharmaceutical compositions or formulations. Compositions and methods for the formulation of pharmaceutical compositions are dependent upon a number of criteria, including, but not limited to, route of administration, extent of disease, or dose to be administered.

[0594] The pharmaceutical compositions of the disclosure can optionally comprise therapeutic agents, pharmaceutical agents, carriers, adjuvants, dispersing agents, diluents, and the like.

[0595] An antisense compound targeted to a HBV nucleic acid can be utilized in pharmaceutical compositions by combining the antisense compound with a suitable pharmaceutically acceptable diluent or carrier. A pharmaceutically acceptable diluent includes phosphate-buffered saline (PBS). PBS is a diluent suitable for use in compositions to be delivered parenterally.

[0596] Accordingly, in one embodiment, employed in the methods described herein is a pharmaceutical composition comprising an antisense compound targeted to a HBV nucleic acid and a pharmaceutically acceptable diluent. In certain embodiments, the pharmaceutically acceptable diluent is PBS. In certain embodiments, the antisense compound is an antisense oligonucleotide.

[0597] Pharmaceutical compositions comprising modified oligonucleotides can encompass any pharmaceutically acceptable salts, esters, or salts of such esters, or any other oligonucleotide which, upon administration to an animal, including a human, is capable of providing (directly or indirectly) the biologically active metabolite or residue thereof. Accordingly, for example, the disclosure is also drawn to pharmaceutically acceptable salts of antisense compounds, prodrugs, pharmaceutically acceptable salts of such prodrugs, and other bioequivalents. Suitable pharmaceutically acceptable salts include, but are not limited to, sodium and potassium salts.

[0598] Modified oligonucleotides formulated as prodrugs are contemplated as within the scope of the instant disclosure. A prodrug can include the incorporation of additional nucleosides at one or both ends of an antisense compound which are cleaved by endogenous nucleases within the body, to form the active antisense compound.

[0599] Pharmaceutical compositions can contain any of the reagents discussed above, and one or more of a pharmaceutically acceptable carrier, a diluent or an excipient.

[0600] A “pharmaceutical composition” is a formulation comprising the modified oligonucleotides described herein, in a form suitable for administration to a subject. In certain embodiments, the pharmaceutical composition is in bulk or in unit dosage form. The unit dosage form is any of a variety of forms, including, for example, a capsule, an IV bag, a tablet, a single use injector, a single pump on an aerosol inhaler or a vial. The quantity of active ingredient (e.g., a formulation of the modified oligonucleotide) in a unit dose of composition is an effective amount and is varied according to the particular treatment involved. One skilled in the art will appreciate that it is sometimes necessary to make routine variations to the dosage depending on the age and condition of the patient. The dosage will also depend on the route of administration. A variety of routes are contemplated, including oral, pulmonary, rectal, parenteral, transdermal, subcutaneous, intravenous, intramuscular, intraperitoneal, inhalational, buccal, sublingual, intrapleural, intrathecal, intranasal, and the like. Dosage forms for the topical or transdermal administration of a of this invention include powders, sprays, ointments, pastes, creams, lotions, gels, solutions, patches and inhalants. In certain embodiments, the modified oligonucleotide is mixed under sterile conditions with a pharmaceutically acceptable carrier, and with any preservatives, buffers, or propellants that are required.

[0601] “Pharmaceutically acceptable excipient” means an excipient that is useful in preparing a pharmaceutical composition that is generally safe, non-toxic and neither biologically nor otherwise undesirable, and includes excipient that is acceptable for veterinary use as well as human pharmaceutical use. A “pharmaceutically acceptable excipient” as used in the specification includes both one and more than one such excipient.

[0602] A pharmaceutical composition is formulated to be compatible with its intended route of administration. Examples of routes of administration include parenteral, e.g., intravenous, intradermal, subcutaneous, oral (e.g., inhalation), transdermal (topical), intraperitoneal (into the body cavity) and transmucosal administration. Solutions or suspensions used for parenteral, intradermal, intraperitoneal or subcutaneous application can include the following components: a sterile diluent such as water for injection, saline solution, fixed oils, polyethylene glycols, glycerine, propylene glycol or other synthetic solvents; antibacterial agents such as benzyl alcohol or methyl parabens; antioxidants such as ascorbic acid or sodium bisulfite; chelating agents such as ethylenediaminetetraacetic acid; buffers such as acetates, citrates or phosphates, and agents for the adjustment of tonicity such as sodium chloride or dextrose. The pH can be adjusted with acids or bases, such as hydrochloric acid or sodium hydroxide. The parenteral or subcutaneous preparation can be enclosed in ampoules, disposable syringes or multiple dose vials made of glass or plastic. These preparations can contain anti-oxidants, buffers, bacteriostats and solutes which render the formulation isotonic with the blood of the intended recipient. Aqueous and non-aqueous sterile suspensions can include suspending agents and thickening agents. The formulations can be presented in unit/dose or multi-dose containers, for example sealed ampoules, syringes and vials, and can be stored in a freeze-dried (lyophilized) condition requiring only the addition of the sterile liquid carrier, for example, saline or water-for-injection immediately prior to use.

[0603] The pharmaceutical composition described herein may be manufactured in a manner that is generally known, e.g., by means of conventional mixing, dissolving, granulating, dragee-making, levigating, emulsifying, encapsulating, entrapping, or lyophilizing processes. Pharmaceutical compositions may be formulated in a conventional manner using one or more pharmaceutically acceptable carriers comprising excipients and/or auxiliaries that facilitate processing of the active agents into preparations that can be used pharmaceutically. Of course, the appropriate formulation is dependent upon the route of administration chosen.

[0604] Pharmaceutical compositions suitable for injectable use include sterile aqueous solutions (where water soluble) or dispersions and sterile powders for the extemporaneous preparation of sterile injectable solutions or dispersion. For intravenous administration, suitable carriers include physiological saline, bacteriostatic water, Cremophor EL™ (BASF, Parsippany, N.J.) or phosphate buffered saline (PBS). In all cases, the composition must be sterile and should be fluid to the extent that easy syringeability exists. It must be stable under the conditions of manufacture and storage and must be preserved against the contaminating action of microorganisms such as bacteria and fungi. The carrier can be a solvent or dispersion medium containing, for example, water, ethanol, polyol (for example, glycerol, propylene glycol, and liquid polyethylene glycol, and the like), and suitable mixtures thereof. The proper fluidity can be maintained, for example, by the use of a coating such as lecithin, by the maintenance of the required particle size in the case of dispersion, and by the use of surfactants. Prevention of the action of microorganisms can be achieved by various antibacterial and antifungal agents, for example, parabens, chlorobutanol, phenol, ascorbic acid, thimerosal, and the like. In many cases, it will be preferable to include isotonic agents, for example, sugars, polyalcohols such as manitol and sorbitol, and sodium chloride in the composition. Prolonged absorption of the injectable compositions can be brought about by including in the composition an agent which delays absorption, for example, aluminum monostearate and gelatin.

[0605] Oral compositions generally include an inert diluent or an edible pharmaceutically acceptable carrier. They can be enclosed in gelatin capsules or compressed into tablets. For the purpose of oral therapeutic administration, the active age can be incorporated with excipients and used in the form of tablets, troches, or capsules. Oral compositions can also be prepared using a fluid carrier for use as a mouthwash, wherein the agents in the fluid carrier is applied orally and swished and expectorated or swallowed. Pharmaceutically compatible binding agents, and/or adjuvant materials can be included as part of the composition. The tablets, pills, capsules, troches and the like can contain any of the following ingredients, or agents of a similar nature: a binder such as microcrystalline cellulose, gum tragacanth or gelatin; an excipient such as starch or lactose, a disintegrating agent such as alginic acid, Primogel, or corn starch; a lubricant such as magnesium stearate or Sterotes; a glidant such as colloidal silicon dioxide; a sweetening agent such as sucrose or saccharin; or a flavoring agent such as peppermint, methyl salicylate, or orange flavoring.

[0606] For administration by inhalation, the agents are delivered in the form of an aerosol spray from pressured container or dispenser, which contains a suitable propellant, e.g., a gas such as carbon dioxide, or a nebulizer.

[0607] Pharmaceutical compositions can be prepared with pharmaceutically acceptable carriers that will protect the modified oligonucleotides against rapid elimination from the body, such as a controlled release formulation, including implants and microencapsulated delivery systems. Biodegradable, biocompatible polymers can be used, such as ethylene vinyl acetate, polyanhydrides, polyglycolic acid, collagen, polyorthoesters, and polylactic acid. Methods for preparation of such formulations will be apparent to those skilled in the art, and the materials can be obtained commercially. Liposomal suspensions (including liposomes targeted to infected cells with monoclonal antibodies to viral antigens) can also be used as pharmaceutically acceptable carriers. These can be prepared according to methods known to those skilled in the art, for example, as described in U.S. Pat. No. 4,522,811.

[0608] It is especially advantageous to formulate oral or parenteral compositions in dosage unit form for ease of administration and uniformity of dosage. Dosage unit form as used herein refers to physically discrete units suited as unitary dosages for the subject to be treated; each unit containing a predetermined quantity of the modified oligonucleotide calculated to produce the desired therapeutic effect in association with the required pharmaceutical carrier. The specification for the dosage unit forms of the disclosure are dictated by and directly dependent on the unique characteristics of the active agent and the particular therapeutic effect to be achieved.

[0609] The pharmaceutical compositions can be included in a container, pack, or dispenser together with instructions for administration.

[0610] Examples of pharmaceutically acceptable salts include, but are not limited to, mineral or organic acid salts of basic residues such as amines, alkali or organic salts of acidic residues such as carboxylic acids, and the like. The pharmaceutically acceptable salts include the conventional non-toxic salts or the quaternary ammonium salts of the parent compound formed, for example, from non-toxic inorganic or organic acids.

[0611] Techniques for formulation and administration of the disclosed compositions of the invention can be found in Remington: the Science and Practice of Pharmacy, 19th edition, Mack Publishing Co., Easton, PA (1995).

[0612] All percentages and ratios used herein, unless otherwise indicated, are by weight. Other features and advantages of the present invention are apparent from the different examples. The provided examples illustrate different components and methodology useful in practicing the present invention. The examples do not limit the claimed invention. Based on the present disclosure the skilled artisan can identify and employ other components and methodology useful for practicing the present invention. Modified oligonucleotides of the disclosure can be covalently linked to one or more moieties or conjugates which enhance the activity, cellular distribution or cellular uptake of the resulting antisense oligonucleotides. Typical conjugate groups include cholesterol moieties and lipid moieties. Additional conjugate groups include carbohydrates, phospholipids, biotin, phenazine, folate, phenanthridine, anthraquinone, acridine, fluoresceins, rhodamines, coumarins, and dyes.

[0613] Modified oligonucleotides can also be modified to have one or more stabilizing groups that are generally attached to one or both termini of antisense compounds to enhance properties such as, for example, nuclease stability. Included in stabilizing groups are cap structures. These terminal modifications protect the antisense compound having terminal nucleic acid from exonuclease degradation, and can help in delivery and/or localization within a cell. The cap can be present at the 5′-terminus (5′-cap), or at the 3′-terminus (3′-cap), or can be present on both termini. Cap structures are well known in the art and include, for example, inverted deoxy abasic caps. Further 3′ and 5′-stabilizing groups that can be used to cap one or both ends of an antisense compound to impart nuclease stability include those disclosed in WO 03/004602 published on Jan. 16, 2003.

[0614] Modified oligonucleotides of the disclosure can be encapsulated within, or incorporated on the surface of particles. In certain embodiments, the particle is a nanoparticle. Exemplary nanoparticles include liposomes, micelles, polymer-based nanoparticles, lipid-polymer based nanoparticles, and polymeric micelles.

[0615] In certain embodiments, the nanoparticle comprises a liposome. Liposomes are spherical vesicles having at least one lipid bilayer, and in some embodiments, an aqueous core. In some embodiments, the lipid bilayer of the liposome may comprise phospholipids. An exemplary but non-limiting example of a phospholipid is phosphatidylcholine, but the lipid bilayer may comprise additional lipids, such as phosphatidylethanolamine. Liposomes may be multilamellar, i.e. consisting of several lamellar phase lipid bilayers, or unilamellar liposomes with a single lipid bilayer. Liposomes can be made in a particular size range that makes them viable targets for phagocytosis. Liposomes can range in size from 20 nm to 100 nm, 100 nm to 400 nm, 1 M and larger, or 200 nm to 3 uM. Examples of lipidoids and lipid-based formulations are provided in U.S. Published application No. 20090023673. In other embodiments, the one or more lipids are one or more cationic lipids. One skilled in the art will recognize which liposomes are appropriate for encapsulation of the modified oligonucleotides described herein.

[0616] In certain embodiments, the nanoparticle comprises a micelle. A micelle is an aggregate of surfactant molecules. An exemplary micelle comprises an aggregate of amphiphilic macromolecules, polymers or copolymers in aqueous solution, wherein the hydrophilic head portions contact the surrounding solvent, while the hydrophobic tail regions are sequestered in the center of the micelle.

[0617] In certain embodiments, the nanoparticle comprises a polymer based nanoparticle. Polymer based nanoparticles comprise one or more polymers, such as a polyester, poly (orthoester), poly (ethylene imine), poly (caprolactone), polyanhydride, poly (acrylic acid), polyglycolide or poly (urethane). In still other embodiments, the one or more polymers comprise poly (lactic acid) (PLA) or poly (lactic-co-glycolic acid) (PLGA). In exemplary embodiments, the one or more polymers comprise polyalkylene glycol such as polyethylene glycol (PEG), or polyalkylene oxide, such as polyethylene oxide (PEO).

[0618] In some embodiments, the nanoparticles or some portion thereof are degradable. In other embodiments, the lipids and/or polymers of the nanoparticles are degradable.

### Conjugated Antisense Compounds

[0619] Antisense compounds may be covalently linked to one or more moieties or conjugates which enhance the activity, cellular distribution or cellular uptake of the resulting antisense oligonucleotides. Typical conjugate groups include cholesterol moieties and lipid moieties. Additional conjugate groups include carbohydrates, phospholipids, biotin, phenazine, folate, phenanthridine, anthraquinone, acridine, fluoresceins, rhodamines, coumarins, and dyes.

[0620] Antisense compounds can also be modified to have one or more stabilizing groups that are generally attached to one or both termini of antisense compounds to enhance properties such as, for example, nuclease stability. Included in stabilizing groups are cap structures. These terminal modifications protect the antisense compound having terminal nucleic acid from exonuclease degradation, and can help in delivery and/or localization within a cell. The cap can be present at the 5′-terminus (5′-cap), or at the 3′-terminus (3′-cap), or can be present on both termini. Cap structures are well known in the art and include, for example, inverted deoxy abasic caps. Further 3′ and 5′-stabilizing groups that can be used to cap one or both ends of an antisense compound to impart nuclease stability include those disclosed in WO 03/004602 published on Jan. 16, 2003.

### Cell Culture and Antisense Compounds Treatment

[0621] The effects of antisense compounds on the level, activity or expression of HBV nucleic acids can be tested in vitro in a variety of cell types. Cell types used for such analyses are available from commercial vendors (e.g. American Type Culture Collection, Manassas, VA; Zen-Bio, Inc., Research Triangle Park, NC; Clonetics Corporation, Walkersville, MD) and are cultured according to the vendor's instructions using commercially available reagents (e.g. Invitrogen Life Technologies, Carlsbad, CA). Illustrative cell types include, but are not limited to, HuVEC cells, b.END cells, HepG2 cells, Hep3B cells, and primary hepatocytes.

### In Vitro Testing of Antisense Oligonucleotides

[0622] Described herein are methods for treatment of cells with antisense oligonucleotides, which can be modified appropriately for treatment with other antisense compounds.

[0623] Cells may be treated with antisense oligonucleotides when the cells reach approximately 60-80% confluency in culture.

[0624] One reagent commonly used to introduce antisense oligonucleotides into cultured cells includes the cationic lipid transfection reagent LIPOFECTIN (Invitrogen, Carlsbad, CA). Antisense oligonucleotides may be mixed with LIPOFECTIN in OPTI-MEM 1 (Invitrogen, Carlsbad, CA) to achieve the desired final concentration of antisense oligonucleotide and a LIPOFECTIN concentration that may range from 2 to 12 μg/mL per 100 nM antisense oligonucleotide.

[0625] Another reagent used to introduce antisense oligonucleotides into cultured cells includes LIPOFECTAMINE (Invitrogen, Carlsbad, CA). Antisense oligonucleotide is mixed with LIPOFECTAMINE in OPTI-MEM 1 reduced serum medium (Invitrogen, Carlsbad, CA) to achieve the desired concentration of antisense oligonucleotide and a LIPOFECTAMINE concentration that may range from 2 to 12 μg/mL per 100 nM antisense oligonucleotide.

[0626] Another technique used to introduce antisense oligonucleotides into cultured cells includes electroporation.

[0627] Cells are treated with antisense oligonucleotides by routine methods. Cells may be harvested 16-24 hours after antisense oligonucleotide treatment, at which time RNA or protein levels of target nucleic acids are measured by methods known in the art and described herein. In general, when treatments are performed in multiple replicates, the data are presented as the average of the replicate treatments.

[0628] The concentration of antisense oligonucleotide used varies from cell line to cell line. Methods to determine the optimal antisense oligonucleotide concentration for a particular cell line are well known in the art. Antisense oligonucleotides are typically used at concentrations ranging from 1 nM to 300 nM when transfected with LIPOFECTAMINE. Antisense oligonucleotides are used at higher concentrations ranging from 625 to 20,000 nM when transfected using electroporation.

### RNA Isolation

[0629] RNA analysis can be performed on total cellular RNA or poly (A)+ mRNA. Methods of RNA isolation are well known in the art. RNA is prepared using methods well known in the art, for example, using the TRIZOL Reagent (Invitrogen, Carlsbad, CA) according to the manufacturer's recommended protocols.

### Analysis of Inhibition of Target Levels or Expression

[0630] Inhibition of levels or expression of a HBV nucleic acid can be assayed in a variety of ways known in the art. For example, target nucleic acid levels can be quantitated by, e.g., Northern blot analysis, competitive polymerase chain reaction (PCR), or quantitative real-time PCR. RNA analysis can be performed on total cellular RNA or poly (A)+ mRNA. Methods of RNA isolation are well known in the art. Northern blot analysis is also routine in the art. Quantitative real-time PCR can be conveniently accomplished using the commercially available ABI PRISM 7600, 7700, or 7900 Sequence Detection System, available from PE-Applied Biosystems, Foster City, CA and used according to manufacturer's instructions.

### Quantitative Real-Time PCR Analysis of Target RNA Levels

[0631] Quantitation of target RNA levels may be accomplished by quantitative real-time PCR using the ABI PRISM 7600, 7700, or 7900 Sequence Detection System (PE-Applied Biosystems, Foster City, CA) according to manufacturer's instructions. Methods of quantitative real-time PCR are well known in the art.

[0632] Prior to real-time PCR, the isolated RNA is subjected to a reverse transcriptase (RT) reaction, which produces complementary DNA (cDNA) that is then used as the substrate for the real-time PCR amplification. The RT and real-time PCR reactions are performed sequentially in the same sample well. RT and real-time PCR reagents may be obtained from Invitrogen (Carlsbad, CA). RT real-time-PCR reactions are carried out by methods well known to those skilled in the art.

[0633] Gene (or RNA) target quantities obtained by real time PCR are normalized using either the expression level of a gene whose expression is constant, such as cyclophilin A, or by quantifying total RNA using RIBOGREEN (Invitrogen, Inc. Carlsbad, CA). Cyclophilin A expression is quantified by real time PCR, by being run simultaneously with the target, multiplexing, or separately. Total RNA is quantified using RIBOGREEN RNA quantification reagent (Invitrogen, Inc. Eugene, OR). Methods of RNA quantification by RIBOGREEN are taught in Jones, L. J., et al, (Analytical Biochemistry, 1998, 265, 368-374). A CYTOFLUOR 4000 instrument (PE Applied Biosystems) is used to measure RIBOGREEN fluorescence.

[0634] Probes and primers are designed to hybridize to a HBV nucleic acid. Methods for designing real-time PCR probes and primers are well known in the art, and may include the use of software such as PRIMER EXPRESS Software (Applied Biosystems, Foster City, CA).

### Quantitative Real-Time PCR Analysis of Target DNA Levels

[0635] Quantitation of target DNA levels may be accomplished by quantitative real-time PCR using the ABI PRISM 7600, 7700, or 7900 Sequence Detection System (PE-Applied Biosystems, Foster City, CA) according to manufacturer's instructions. Methods of quantitative real-time PCR are well known in the art.

[0636] Gene (or DNA) target quantities obtained by real time PCR are normalized using either the expression level of a gene whose expression is constant, such as cyclophilin A, or by quantifying total DNA using RIBOGREEN (Invitrogen, Inc. Carlsbad, CA). Cyclophilin A expression is quantified by real time PCR, by being run simultaneously with the target, multiplexing, or separately. Total DNA is quantified using RIBOGREEN RNA quantification reagent (Invetrogen, Inc. Eugene, OR). Methods of DNA quantification by RIBOGREEN are taught in Jones, L. J., et al, (Analytical Biochemistry, 1998, 265, 368-374). A CYTOFLUOR 4000 instrument (PE Applied Biosystems) is used to measure RIBOGREEN fluorescence.

[0637] Probes and primers are designed to hybridize to a HBV nucleic acid. Methods for designing real-time PCR probes and primers are well known in the art, and may include the use of software such as PRIMER EXPRESS Software (Applied Biosystems, Foster City, CA).

### Analysis of Protein Levels

[0638] Antisense inhibition of HBV nucleic acids can be assessed by measuring HBV protein levels. Protein levels of HBV can be evaluated or quantitated in a variety of ways well known in the art, such as immunoprecipitation, Western blot analysis (immunoblotting), enzyme-linked immunosorbent assay (ELISA), quantitative protein assays, protein activity assays (for example, caspase activity assays), immunohistochemistry, immunocytochemistry or fluorescence-activated cell sorting (FACS). Antibodies directed to a target can be identified and obtained from a variety of sources, such as the MSRS catalog of antibodies (Aerie Corporation, Birmingham, MI), or can be prepared via conventional monoclonal or polyclonal antibody generation methods well known in the art.

### In Vivo Testing of Antisense Compounds

[0639] Antisense compounds, for example, antisense oligonucleotides, are tested in animals to assess their ability to inhibit expression of HBV and produce phenotypic changes. Testing may be performed in normal animals, or in experimental disease models. For administration to animals, antisense oligonucleotides are formulated in a pharmaceutically acceptable diluent, such as phosphate-buffered saline. Administration includes parenteral routes of administration, such as intraperitoneal, intravenous, subcutaneous, intrathecal, and intracerebroventricular. Administration also includes intra-ocular and intramuscular routes of administration. Calculation of antisense oligonucleotide dosage and dosing frequency is within the abilities of those skilled in the art, and depends upon factors such as route of administration and animal body weight. Following a period of treatment with antisense oligonucleotides, RNA is isolated from liver tissue and changes in HBV nucleic acid expression are measured. Changes in HBV DNA levels are also measured. Changes in HBV protein levels are also measured. Changes in HBV HBeAg levels are also measured. Changes in HBV HBsAg levels are also measured.

### Certain Indications

[0640] In certain embodiments, provided herein are methods, compounds, and compositions of treating an individual comprising administering one or more pharmaceutical compositions provided herein. In certain embodiments, the individual has an HBV-related condition. In certain embodiments, chronic HBV infection, Hepatitis Delta virus (HDV) infection (e.g. in subject co-infected with HBV), inflammation, fibrosis, cirrhosis, liver cancer, serum hepatitis, jaundice, liver cancer, liver inflammation, liver fibrosis, liver cirrhosis, liver failure, diffuse hepatocellular inflammatory disease, hemophagocytic syndrome, serum hepatitis, and HBV viremia. In certain embodiments, the HBV-related condition may have which may include any or all of the following: flu-like illness, weakness, aches, headache, fever, loss of appetite, diarrhea, jaundice, nausea and vomiting, pain over the liver area of the body, clay- or grey-colored stool, itching all over, and dark-colored urine, when coupled with a positive test for presence of a hepatitis B virus, a hepatitis B viral antigen, or a positive test for the presence of an antibody specific for a hepatitis B viral antigen. In certain embodiments, the individual is at risk for an HBV-related condition. This includes individuals having one or more risk factors for developing an HBV-related condition, including sexual exposure to an individual infected with Hepatitis B virus, living in the same house as an individual with a lifelong hepatitis B virus infection, exposure to human blood infected with the hepatitis B virus, injection of illicit drugs, being a person who has hemophilia, and visiting an area where hepatitis B is common. In certain embodiments, the individual has been identified as in need of treatment for an HBV-related condition. In certain embodiments provided herein are methods for prophylactically reducing HBV expression in an individual. Certain embodiments include treating an individual in need thereof by administering to an individual a therapeutically effective amount of an antisense compound targeted to an HBV nucleic acid.

[0641] Due to overlapping transmission routes, many people have been exposed to both hepatitis B virus (HBV) and hepatitis C virus (HCV), and a smaller proportion are chronically infected with both viruses, especially in regions such as Asia where HBV is endemic. Estimates suggest that up to 10% of people with HCV may also have HBV, while perhaps 20% of people with HBV are co-infected with HCV. However, treatment of hepatitis B or hepatitis B in I—IBV—HCV co-infected individuals has not been well studied. Treatment is complicated by the fact that HCV and HBV appear to inhibit each other's replication (though not all studied have observed this interaction). Therefore, treatment that fully suppresses HBV could potentially allow HCV to re-emerge, or vice versa. Therefore, the compounds and compositions described herein may advantageously be used for treating patients infected with both HBV and HCV. Exemplary treatment options for hepatitis C (HCV) include interferons, e.g., interferon alpha-2b, interferon alpha-2a, and interferon alphacon-1. Less frequent interferon dosing can be achieved using pegylated interferon (interferon attached to a polyethylene glycol moiety which improves its pharmacokinetic profile). Combination therapy with interferon alpha-2b (pegylated and unpegylated) and ribavirin has also been shown to be efficacious for some patient populations. Other agents currently being developed include HCV RNA replication inhibitors (e.g., ViroPharma's VP50406 series), HCV antisense agents, HCV therapeutic vaccines, HCV protease inhibitors, HCV helicase inhibitors and HCV antibody therapy (monoclonal or polyclonal).

[0642] In certain embodiments, treatment with the methods, compounds, and compositions described herein is useful for preventing an HBV-related condition associated with the presence of the hepatitis B virus. In certain embodiments, treatment with the methods, compounds, and compositions described herein is useful for preventing an HBV-related condition.

[0643] In one embodiment, administration of a therapeutically effective amount of an antisense compound targeted to an HBV nucleic acid is accompanied by monitoring of HBV mRNA levels in the serum of an individual to determine an individual's response to administration of the antisense compound. In certain embodiments, administration of a therapeutically effective amount of an antisense compound targeted to an HBV nucleic acid is accompanied by monitoring of HBV DNA levels in the serum of an individual to determine an individual's response to administration of the antisense compound. In certain embodiments, administration of a therapeutically effective amount of an antisense compound targeted to an HBV nucleic acid is accompanied by monitoring of HBV protein levels in the serum of an individual to determine an individual's response to administration of the antisense compound. In certain embodiments, administration of a therapeutically effective amount of an antisense compound targeted to an HBV nucleic acid is accompanied by monitoring of HBV S antigen (HBsAg) levels in the serum of an individual to determine an individual's response to administration of the antisense compound. In certain embodiments, administration of a therapeutically effective amount of an antisense compound targeted to an HBV nucleic acid is accompanied by monitoring of HBV E antigen (HBeAg) levels in the serum of an individual to determine an individual's response to administration of the antisense compound. An individual's response to administration of the antisense compound is used by a physician to determine the amount and duration of therapeutic intervention.

[0644] In certain embodiments, administration of an antisense compound targeted to an HBV nucleic acid results in reduction of HBV expression by at least 15, 20, 25, 30, 35, 40, 45, 50, 55, 60, 65, 70, 75, 80, 85, 90, 95 or 99%, or a range defined by any two of these values. In certain embodiments, administration of an antisense compound targeted to an HBV nucleic acid results in reduced symptoms associated with the HBV-related condition and reduced HBV-related markers in the blood. In certain embodiments, administration of an HBV antisense compound decreases HBV RNA levels, HBV DNA levels, HBV protein levels, HBsAg levels, or HBeAg levels by at least 15, 20, 25, 30, 35, 40, 45, 50, 55, 60, 65, 70, 75, 80, 85, 90, 95 or 99%, or a range defined by any two of these values.

[0645] In certain embodiments, pharmaceutical compositions comprising an antisense compound targeted to HBV are used for the preparation of a medicament for treating a patient suffering or susceptible to an HBV-related condition.

### Certain Combination Therapies

[0646] In certain embodiments, one or more pharmaceutical compositions provided herein are co-administered with one or more other pharmaceutical agents. In certain embodiments, such one or more other pharmaceutical agents are designed to treat the same disease, disorder, or condition as the one or more pharmaceutical compositions provided herein. In certain embodiments, such one or more other pharmaceutical agents are designed to treat a different disease, disorder, or condition as the one or more pharmaceutical compositions provided herein.

[0647] In certain embodiments, such one or more other pharmaceutical agents are designed to treat an undesired side effect of one or more pharmaceutical compositions provided herein. In certain embodiments, one or more pharmaceutical compositions provided herein are co-administered with another pharmaceutical agent to treat an undesired effect of that other pharmaceutical agent. In certain embodiments, one or more pharmaceutical compositions provided herein are co-administered with another pharmaceutical agent to produce a combinational effect. In certain embodiments, one or more pharmaceutical compositions provided herein are co-administered with another pharmaceutical agent to produce a synergistic effect.

[0648] In certain embodiments, one or more pharmaceutical compositions provided herein and one or more other pharmaceutical agents are administered at the same time. In certain embodiments, one or more pharmaceutical compositions provided herein and one or more other pharmaceutical agents are administered at different times. In certain embodiments, one or more pharmaceutical compositions provided herein and one or more other pharmaceutical agents are prepared together in a single formulation. In certain embodiments, one or more pharmaceutical compositions provided herein and one or more other pharmaceutical agents are prepared separately.

### ENUMERATED EMBODIMENTS

[0649] While various specific embodiments have been illustrated and described, it will be appreciated that various changes can be made without departing from the spirit and scope of the disclosure(s). The present disclosure is exemplified by the numbered embodiments set forth below.

### Set I

[0650] Embodiment I-1. A compound comprising a modified oligonucleotide of 20 linked nucleosides consisting of:
[0651] a first gap segment consisting of linked nucleosides;
[0652] a second gap segment consisting of linked nucleosides;
[0653] a separator segment consisting of a nucleoside linked to the first gap segment and the second gap segment;
[0654] a 5′ wing segment consisting of linked nucleosides; and
[0655] a 3′ wing segment consisting of linked nucleosides;
   wherein the first gap segment, separator segment, and second gap segment are positioned between the 5′ wing segment and the 3′ wing segment;
   wherein the first gap segment is attached to the 5′ wing segment, and the second gap segment is attached to the 3′ wing segment
   wherein the first gap segment, separator segment, and second gap segment, taken together, consist of from 8 to 12 linked nucleosides.

[0656] Embodiment I-2. The compound of embodiment I-1, wherein the first gap segment consists of linked nucleosides with 2′-deoxy sugars.

[0657] Embodiment I-3. The compound of embodiment I-1 or I-2, wherein the second gap segment consists of linked nucleosides with 2′-deoxy sugars.

[0658] Embodiment I-4. The compound of a preceding embodiment, wherein the separator segment consists of one nucleoside comprising a 2′-O(CH₂)₂—OCH₃ sugar or a 2′—OCH₃ sugar.

[0659] Embodiment I-5. The compound of a preceding embodiment, wherein at least one of the nucleosides in the 5′ wing segment comprises a 2′-O(CH₂)₂—OCH₃ sugar.

[0660] Embodiment I-6. The compound of a preceding embodiment, wherein at least one of the nucleosides in the 3′ wing segment comprises a 2′-O(CH₂)₂—OCH₃ sugar.

[0661] Embodiment I-7. The compound of a preceding embodiment, wherein the modified oligonucleotide is at least 75%, or at least 80%, or at least 85%, or at least 90%, or at least 95%, or 100% complementary to a HBV nucleic acid.

[0662] Embodiment I-8. The compound of a preceding embodiment, wherein the modified oligonucleotide has a nucleobase sequence of SEQ ID NO: 2 (GCAGA GGTGA AGCGA AGTGC).

[0663] Embodiment I-9. The compound of a preceding embodiment, wherein the modified oligonucleotide is a single-stranded modified oligonucleotide.

[0664] Embodiment I-10. The compound of a preceding embodiment, wherein at least one internucleoside linkage is a modified internucleoside linkage.

[0665] Embodiment I-11. The compound of embodiment I-10, wherein each internucleoside linkage is a phosphorothioate internucleoside linkage.

[0666] Embodiment I-12. The compound of a preceding embodiment, wherein the modified oligonucleotide comprises at least one modified nucleobase.

[0667] Embodiment I-13. The compound of a preceding embodiment, wherein the modified oligonucleotide comprises one, two, or three modified nucleobase(s).

[0668] Embodiment I-14. The compound of embodiment I-12 or I-13, wherein the modified nucleobase is a 5-methylcytosine.

[0669] Embodiment I-15. The compound of embodiment I-1, wherein the cytosines at positions 2, 13, and 20 of SEQ ID NO: 2 are each 5-methylcytosine.

[0670] Embodiment I-16. The compound a preceding embodiment, wherein each of the nucleosides in the 5′ wing segment comprise a 2′-O(CH₂)₂—OCH₃ sugar.

[0671] Embodiment I-17. The compound of a preceding embodiment, wherein each of the nucleosides in the 3′ wing segment comprise a 2′-O(CH₂)₂—OCH₃ sugar.

[0672] Embodiment I-18. The compound of embodiments 1 to I-15, wherein the 5′ wing segment comprises a nucleoside with a 2′-deoxy sugar.

[0673] Embodiment I-19. The compound of embodiment I-18, wherein the other nucleosides in the 5′ wing segment comprise a 2′-O(CH₂)₂—OCH₃ sugar.

[0674] Embodiment I-20. The compound of embodiment I-1, wherein the nucleoside at position 2 of SEQ ID NO: 2 comprises a 2′-deoxy sugar.

[0675] Embodiment I-21. The compound of embodiment I-1, wherein the 5′ wing segment further comprises two nucleosides each with a 2′-deoxy sugar.

[0676] Embodiment I-22. The compound of embodiment I-1, wherein the nucleosides at positions 2 and 5 of SEQ ID NO: 2 comprise a 2′-deoxy sugar.

[0677] Embodiment I-23. The compound of embodiment I-1, wherein the 3′ wing segment comprises a nucleoside with a 2′-deoxy sugar.

[0678] Embodiment I-24. The compound of embodiment I-23, wherein the other nucleosides in the 3′ wing segment comprise a 2′-O(CH₂)₂—OCH₃ sugar.

[0679] Embodiment I-25. The compound of embodiment I-1, wherein the nucleoside at position 16 of SEQ ID NO: 2 comprises a 2′-deoxy sugar.

[0680] Embodiment I-26. The compound of embodiment I-1, wherein one, two, three, or four of the nucleosides in the 5′ wing segment comprise a 4′-CH₂—O-2′ sugar.

[0681] Embodiment I-27. The compound of embodiment I-26, wherein two of the nucleosides in the 5′ wing segment comprise a 4′-CH₂—O-2′ sugar.

[0682] Embodiment I-28. The compound of embodiment I-1, wherein the nucleosides at positions 1 and 3 of SEQ ID NO: 2 comprise a 4′-CH₂—O-2′ sugar.

[0683] Embodiment I-29. The compound of embodiment I-1, wherein one, two, three, or four of the nucleosides in the 3′ wing segment comprise a 4′-CH₂—O-2′ sugar.

[0684] Embodiment I-30. The compound of embodiment I-29, wherein two of the nucleosides in the 3′ wing segment comprise a 4′-CH₂—O-2′ sugar.

[0685] Embodiment I-31. The compound of embodiment I-1, wherein the nucleosides at positions 17 and 18 of SEQ ID NO: 2 comprise a 4′-CH₂—O-2′ sugar.

[0686] Embodiment I-32. The compound of embodiment I-1, wherein the nucleosides at positions 16 and 19 of SEQ ID NO: 2 comprise a 4′-CH₂—O-2′ sugar.

[0687] Embodiment I-33. The compound of embodiment I-1, wherein the nucleosides at positions 17 and 20 of SEQ ID NO: 2 comprise a 4′-CH₂—O-2′ sugar.

[0688] Embodiment I-34. The compound of embodiment I-29, wherein three of the nucleosides in the 3′ wing segment comprise a 4′-CH₂—O-2′ sugar.

[0689] Embodiment I-35. The compound of embodiment I-1, wherein the nucleosides at positions 17, 19, and 20 of SEQ ID NO: 2 comprise a 4′-CH₂—O-2′ sugar.

[0690] Embodiment I-36. The compound of a preceding embodiment, wherein the first gap segment consists of 1, 2, 3, 4, 5, 6, 7, or 8 linked nucleosides.

[0691] Embodiment I-37. The compound of a preceding embodiment, wherein the first gap segment consists of 4 or 5 linked nucleosides.

[0692] Embodiment I-38. The compound of a preceding embodiment, wherein the first gap segment consists of 4 linked nucleosides.

[0693] Embodiment I-39. The compound of a preceding embodiment, wherein the second gap segment consists of 1, 2, 3, 4, 5, 6, 7, or 8 linked nucleosides.

[0694] Embodiment I-40. The compound of a preceding embodiment, wherein the second gap segment consists of 5 or 6 linked nucleosides.

[0695] Embodiment I-41. The compound of a preceding embodiment, wherein the second gap segment consists of 5 linked nucleosides.

[0696] Embodiment I-42. The compound of a preceding embodiment, wherein the separator segment is at position 7 or 8 or 9 or 10 or 11 or 12 or 13 or 14 of SEQ ID NO: 2.

[0697] Embodiment I-43. The compound of a preceding embodiment, wherein the separator segment is at position 9 or 10 or 11 of SEQ ID NO: 2.

[0698] Embodiment I-44. The compound of a preceding embodiment, wherein the separator segment is at position 10 of SEQ ID NO: 2.

[0699] Embodiment I-45. The compound of embodiment I-1, wherein
[0700] the 5′ wing segment consists of 5 linked nucleosides; and
[0701] the 3′ wing segment consists of 5 linked nucleosides;
[0702] the first gap segment consists of 4 linked nucleosides with 2′-deoxy sugars;
[0703] the second gap segment consists of 5 linked nucleosides with 2′-deoxy sugars;
[0704] the separator segment is at position 10 of SEQ ID NO:2;
[0705] the cytosines at positions 2, 13, and 20 of SEQ ID NO: 2 are each 5-methylcytosine each internucleoside linkage is a phosphorothioate internucleoside linkage.

[0706] Embodiment I-46. The compound of embodiment I-1, wherein
[0707] the 5′ wing segment consists of 4 linked nucleosides; and
[0708] the 3′ wing segment consists of 5 linked nucleosides;
[0709] the first gap segment consists of 5 linked nucleosides with 2′-deoxy sugars;
[0710] the second gap segment consists of 5 linked nucleosides with 2′-deoxy sugars;
[0711] the separator segment is at position 10 of SEQ ID NO:2;
[0712] the cytosines at positions 2, 13, and 20 of SEQ ID NO: 2 are each 5-methylcytosine;
[0713] each internucleoside linkage is a phosphorothioate internucleoside linkage.

[0714] Embodiment I-47. The compound of embodiment I-1, wherein
[0715] the 5′ wing segment consists of 5 linked nucleosides; and
[0716] the 3′ wing segment consists of 4 linked nucleosides;
[0717] the first gap segment consists of 4 linked nucleosides with 2′-deoxy sugars;
[0718] the second gap segment consists of 6 linked nucleosides with 2′-deoxy sugars; and
[0719] the separator segment is at position 10 of SEQ ID NO:2;
[0720] each internucleoside linkage is a phosphorothioate internucleoside linkage.

[0721] Embodiment I-48. The compound of embodiment I-1, wherein
[0722] the 5′ wing segment consists of 4 linked nucleosides; and
[0723] the 3′ wing segment consists of 6 linked nucleosides;
[0724] the first gap segment consists of 5 linked nucleosides with 2′-deoxy sugars;
[0725] the second gap segment consists of 4 linked nucleosides with 2′-deoxy sugars; and
[0726] the separator segment is at position 10 of SEQ ID NO:2;
[0727] each internucleoside linkage is a phosphorothioate internucleoside linkage.

[0728] Embodiment I-49. The compound of embodiment I-1, wherein the 5′ wing segment consists of 5 linked nucleosides; and the 3′ wing segment consists of 6 linked nucleosides;
[0729] the first gap segment consists of 4 linked nucleosides with 2′-deoxy sugars;
[0730] the second gap segment consists of 4 linked nucleosides with 2′-deoxy sugars;
[0731] each internucleoside linkage is a phosphorothioate internucleoside linkage.

[0732] Embodiment I-50. The compound of embodiment I-1, wherein the modified oligonucleotide has a sequence which is a member selected from the group consisting of A, B, C, D, E, F, G, H, I, J, K, L, M, N, O, P, Q, R, S, T, U, V, W, X, Y, Z, AA, AB, AC, AD, AE, AF, AG, AH, AI, AJ, AK, AL, AM, AN, AO, AP, AQ, AR, AS, AT, AU, AV, AW, and AX.

[0733] Embodiment I-51. A composition comprising the compound of any of embodiments I-1 to I-50 or salt thereof and at least one of a pharmaceutically acceptable carrier or diluent.

[0734] Embodiment I-52. A method comprising administering to an animal the compound or composition of any of embodiments I-1 to I-51.

[0735] Embodiment I-53. The method of embodiment I-52, wherein the animal is a human.

[0736] Embodiment I-54. The method of embodiment I-52, wherein administering the compound prevents, treats, ameliorates, or slows progression of a HBV-related disease, disorder or condition.

[0737] Embodiment I-55. The method of embodiment I-54, wherein the disease, disorder or condition is liver disease.

[0738] Embodiment I-56. The method of embodiment I-54, wherein the disease, disorder or condition is jaundice, liver inflammation, liver fibrosis, inflammation, liver cirrhosis, liver failure, diffuse hepatocellular inflammatory disease, hemophagocytic syndrome, serum hepatitis, HBV viremia, or liver disease-related transplantation.

[0739] Embodiment I-57. The method of embodiment I-54, wherein the disease or condition is a hyperproliferative condition.

[0740] Embodiment I-58. The method of embodiment I-57, wherein the hyperproliferative condition is liver cancer.

[0741] Embodiment I-59. A method of reducing HBV antigen levels in an animal comprising administering to said animal the compound or composition of any of embodiments I-1 to I-51.

[0742] Embodiment I-60. The method of embodiment I-59, wherein HBsAg levels are reduced.

[0743] Embodiment I-61. The method of embodiment I-59, wherein HBeAg levels are reduced.

[0744] Embodiment I-62. The method of embodiment I-59, wherein the animal is human.

### Set II

[0745] Embodiment II-1. A compound comprising a modified oligonucleotide, the modified oligonucleotide comprising from 5′ to 3′:

5′ W1-G1-S1-G2-W2 3′ (Formula I)

wherein:
[0746] W1 is a 5′ wing segment;
[0747] W2 is a 3′ wing segment;
[0748] G1 is a first gap segment;
[0749] S1 is a first separator segment;
[0750] G2 is a second gap segment;
[0751] - is an internucleoside linkage; and
[0752] at least one nucleoside of the oligonucleotide is modified.

[0753] Embodiment II-2. The compound of embodiment II-1, wherein the modified oligonucleotide comprises from 5′ to 3′:

5′ W1-G1-S1-G2-S2-G3-W2 3′ (Formula II)

wherein:
[0754] S2 is a second separator segment; and
[0755] G3 is a third gap segment.

[0756] Embodiment II-3. The compound of embodiment II-2, wherein the modified oligonucleotide comprises from 5′ to 3′:

5′ W1-G1-S1-G2-S2-G3-S3-G4-W2 3′ (Formula III)

wherein:
[0757] S3 is a third separator segment; and
[0758] G4 is a fourth gap segment.

[0759] Embodiment II-4. The compound of embodiment II-3, wherein the modified oligonucleotide comprises from 5′ to 3′:

5′ W1-G1-S1-G2-S2-G3-S3-G4-S4-G5-W2 3′ (Formula IV)

wherein:
[0760] S4 is a fourth separator segment; and
[0761] G5 is a fifth gap segment.

[0762] Embodiment II-5. The compound of embodiment II-4, wherein the modified oligonucleotide comprises from 5′ to 3′:

5′ W1-G1-S1-G2-S2-G3-S3-G4-S4-G5-S5-G6-W2 3′ (Formula V)

wherein:
[0763] S5 is a fifth separator segment; and
[0764] G6 is a sixth gap segment.

[0765] Embodiment II-6. The compound of embodiment II-5, wherein the modified oligonucleotide comprises from 5′ to 3′:

5′ W1-G1-S1-G2-S2-G3-S3-G4-S4-G5-S5-G6-S6-G7-W2 3′ (Formula VI)

wherein:
[0766] S6 is a sixth separator segment; and
[0767] G7 is a seventh gap segment.

[0768] Embodiment II-7. The compound of any one of embodiments II-1 to II-6, wherein W1 comprises one or more linked deoxynucleosides.

[0769] Embodiment II-8. The compound of any one of embodiments II-1 to II-7, wherein W2 comprises one or more linked deoxynucleosides.

[0770] Embodiment II-9. The compound of any one of embodiments II-1 to II-8, wherein W1 comprises 2 to 25 linked nucleosides.

[0771] Embodiment II-10. The compound of any one of embodiments II-1 to II-9, wherein W2 comprises 2 to 35 linked nucleosides.

[0772] Embodiment II-11. The compound of any one of embodiments II-1 to II-10, wherein G1 comprises 1 to 10 linked deoxynucleosides.

[0773] Embodiment II-12. The compound of any one of embodiments II-1 to II-11, wherein G2 comprises 1 to 10 linked deoxynucleosides.

[0774] Embodiment II-13. The compound of any one of embodiments II-1 to II-12, wherein S1 comprises 1 to 3 linked nucleosides.

[0775] Embodiment II-14. The compound of any one of embodiments II-2 to II-13, wherein G3 comprises 1 to 10 linked deoxynucleosides.

[0776] Embodiment II-15. The compound of any one of embodiments II-2 to II-14, wherein S2 comprises 1 to 3 linked nucleosides.

[0777] Embodiment II-16. The compound of any one of embodiments II-3 to II-15, wherein G4 comprises 1 to 10 linked deoxynucleosides.

[0778] Embodiment II-17. The compound of any one of embodiments II-3 to II-16, wherein S3 comprises 1 or 2 linked nucleosides.

[0779] Embodiment II-18. The compound of any one of embodiments II-4 to II-17, wherein G5 comprises 1 to 10 linked deoxynucleosides.

[0780] Embodiment II-19. The compound of any one of embodiments II-4 to II-17, wherein S4 comprises 1 to 3 linked nucleosides.

[0781] Embodiment II-20. The compound of any one of embodiments II-5 to II-19, wherein G6 comprises 1 to 10 linked deoxynucleosides.

[0782] Embodiment II-21. The compound of any one of embodiments II-5 to II-19, wherein S5 comprises 1 to 3 linked nucleosides.

[0783] Embodiment II-22. The compound of any one of embodiments II-6 to II-21, wherein G7 comprises 1 to 10 linked deoxynucleosides.

[0784] Embodiment II-23. The compound of any one of embodiments II-6 to II-22, wherein S6 comprises 1 to 3 linked nucleosides.

[0785] Embodiment II-24. The compound of any one of embodiments II-1 to II-23, wherein the oligonucleotide is 18-50 nucleobases in length.

[0786] Embodiment II-25. The compound of any one of embodiments II-1 to II-23, wherein the oligonucleotide is at least 20 nucleobases in length.

[0787] Embodiment II-26. The compound of any one of embodiments II-1 to II-23, wherein the oligonucleotide is 20 nucleobases in length.

[0788] Embodiment II-27. The compound of embodiment II-1, wherein the oligonucleotide is 20 linked nucleobases in length.

[0789] Embodiment II-28. The compound of embodiment II-27, wherein W1 comprises 4 linked nucleosides.

[0790] Embodiment II-29. The compound of embodiment II-27, wherein W1 comprises 5 linked nucleosides.

[0791] Embodiment II-30. The compound of any one of embodiments II-27 to II-29, wherein G1 comprises 4 linked deoxynucleosides.

[0792] Embodiment II-31. The compound of any one of embodiments II-27 to II-29, wherein G1 comprises 5 linked deoxynucleosides.

[0793] Embodiment II-32. The compound of any one of embodiments II-27 to II-29, wherein G1 comprises 6 linked deoxynucleosides.

[0794] Embodiment II-33. The compound of any one of embodiments II-27 to II-32, wherein G2 comprises 4 linked deoxynucleosides.

[0795] Embodiment II-34. The compound of any one of embodiments II-27 to II-32, wherein G2 comprises 5 linked deoxynucleosides.

[0796] Embodiment II-35. The compound of any one of embodiments II-27 to II-32, wherein G2 comprises 6 linked deoxynucleosides.

[0797] Embodiment II-36. The compound of any one of embodiments II-27 to II-33, wherein S1 comprises at least one linked nucleoside.

[0798] Embodiment II-37. The compound of any one of embodiments II-27 to II-35, wherein W2 comprises 5 linked nucleosides.

[0799] Embodiment II-38. The compound of any one of embodiments II-27 to II-35, wherein W2 comprises 6 linked nucleosides.

[0800] Embodiment II-39. The compound of any one of embodiments II-27 to II-38, wherein the S1 is at position 10 of the oligonucleotide.

[0801] Embodiment II-40. The compound of embodiment II-39, wherein W1 comprises 4 linked nucleosides, G1 comprises 5 linked deoxynucleosides, S1 comprises 1 linked nucleoside, G2 comprises 5 linked deoxynucleosides, and W2 comprises 5 linked nucleosides.

[0802] Embodiment II-41. The compound of embodiment II-1, wherein W1 comprises 4-6 linked nucleosides.

[0803] Embodiment II-42. The compound of embodiment II-41, wherein W2 comprises 4-6 linked nucleosides.

[0804] Embodiment II-43. The compound of any one of embodiments II-41 to II-42, wherein G1 comprises 1-6 linked deoxynucleosides.

[0805] Embodiment II-44. The compound of any one of embodiments II-41 to II-43, wherein G2 comprises 1-6 linked deoxynucleosides.

[0806] Embodiment II-45. The compound of any one of embodiments II-41 to II-44, wherein G3 comprises 1-6 linked deoxynucleosides.

[0807] Embodiment II-46. The compound of any one of embodiments II-41 to II-45, wherein S1 comprises least one linked nucleoside.

[0808] Embodiment II-47. The compound of any one of embodiments II-41 to II-46, wherein the length of the G1-S1-G2 is between 8 and 12 nucleobases in length.

[0809] Embodiment II-48. The compound of any one of embodiments II-1 to II-47, wherein any one or more of G1, G2, G3, G4, G5, G6, and G7 comprises a nucleoside comprising a modification to a 2′-deoxynucleoside.

[0810] Embodiment II-49. The compound of embodiment II-48, wherein any one or more of G1, G2, G3, G4, G5, G6, and G7 comprises a nucleoside comprising a 2′-deoxy 5-methylcytidine sugar modification.

[0811] Embodiment II-50. The compound of any one of embodiments II-1 to II-49, wherein S1, S2, S3, S4, S5, and/or S6 comprises a nucleoside comprising a 2′-O-methoxyethyl sugar modification.

[0812] Embodiment II-51. The compound of any one of embodiments II-1 to II-49, wherein S1, S2, S3, S4, S5, and/or S6 comprises a nucleoside comprising a 5-methylcytidine.

[0813] Embodiment II-52. The compound of any one of embodiments II-1 to II-49, wherein S1, S2, S3, S4, S5, and/or S6 comprises a nucleoside comprising a 2′-O-methyl sugar modification.

[0814] Embodiment II-53. The compound of any one of embodiments II-1 to II-52, wherein S1, S2, S3, S4, S5, and/or S6 comprises a nucleoside comprising a 2′-OH sugar modification.

[0815] Embodiment II-54. The compound of any one of embodiments II-1 to II-53, wherein S1, S2, S3, S4, S5, and/or S6 comprises a nucleoside comprising a 2′-fluoro sugar modification.

[0816] Embodiment II-55. The compound of any one of embodiments II-1 to II-54, wherein S1, S2, S3, S4, S5, and/or S6 comprises a nucleoside comprising a 2′-fluoro-arabinonucleic acid (2′-fluoro-ANA) sugar modification.

[0817] Embodiment II-56. The compound of any one of embodiments II-1 to II-55, wherein S1, S2, S3, S4, S5, and/or S6 comprises a glycol nucleic acid (GNA).

[0818] Embodiment II-57. The compound of any one of embodiments II-1 to II-56, wherein S1, S2, S3, S4, S5, and/or S6 comprises a LNA.

[0819] Embodiment II-58. The compound of any one of embodiments II-1 to II-57, wherein W1 comprises a nucleoside comprising a 2′-deoxy sugar modification.

[0820] Embodiment II-59. The compound of embodiment II-58, wherein the 2′-deoxy sugar modification is at positions 2 and/or 5 of a sequence corresponding to SEQ ID NO: 2.

[0821] Embodiment II-60. The compound of any one of embodiments II-1 to II-59, wherein W1 comprises a nucleoside comprising a 2′-O-methoxyethyl sugar modification.

[0822] Embodiment II-61. The compound of embodiment II-60, wherein the 2′-O-methoxyethyl sugar modification is at position 1, 2, 3, 4 and/or 5 of a sequence corresponding to SEQ ID NO: 2.

[0823] Embodiment II-62. The compound of any one of embodiments II-1 to II-61, wherein W1 comprises a 2′-O-methoxyethyl 5-methylcytidine at position 2 of a sequence corresponding to SEQ ID NO: 2.

[0824] Embodiment II-63. The compound of any one of embodiments II-1 to II-62, wherein W1 comprises a nucleoside comprising a 2′-O-methyl sugar modification.

[0825] Embodiment II-64. The compound of embodiment II-63, wherein the 2′-O-methyl sugar modification is at positions 1, 2, 3, 4 and/or 5 of a sequence corresponding to SEQ ID NO: 2.

[0826] Embodiment II-65. The compound of embodiment II-63, wherein W1 comprises a 2′-O-methyl 5-methylcytidine at position 2 of a sequence corresponding to SEQ ID NO: 2.

[0827] Embodiment II-66. The compound of any one of embodiments II-1 to II-65, wherein W1 comprises a nucleoside comprising a 2′-fluoro sugar modification.

[0828] Embodiment II-67. The compound of any one of embodiments II-1 to II-66, wherein W1 comprises a nucleoside comprising a 2′-fluoro-arabinonucleic acid (2′-fluoro-ANA) modification.

[0829] Embodiment II-68. The compound of any one of embodiments II-1 to II-67, wherein W1 comprises a glycol nucleic acid (GNA).

[0830] Embodiment II-69. The compound of any one of embodiments II-1 to II-67, wherein the GNA is at position 2 of a sequence corresponding to SEQ ID NO: 2.

[0831] Embodiment II-70. The compound of any one of embodiments II-1 to II-69, wherein W1 comprises a modified nucleoside and wherein the modified nucleoside is a locked nucleic acid (LNA).

[0832] Embodiment II-71. The compound of embodiment II-70, wherein the LNA is at positions 1 and/or 3 of a sequence corresponding to SEQ ID NO: 2.

[0833] Embodiment II-72. The compound of any one of embodiments II-1 to II-71, wherein W2 comprises a nucleoside comprising a 2′-deoxy sugar modification.

[0834] Embodiment II-73. The compound of embodiment II-72, wherein the 2′-deoxy sugar modification is at positions 15 and/or 16 of a sequence corresponding to SEQ ID NO: 2.

[0835] Embodiment II-74. The compound of any one of embodiments II-1 to II-73, wherein W2 comprises a nucleoside comprising a 2′-O-methoxyethyl sugar modification.

[0836] Embodiment II-75. The compound of embodiment II-74, wherein the 2′-O-methoxyethyl sugar modification is at positions 15, 16, 17, 18, 19 and/or 20 of a sequence corresponding to SEQ ID NO: 2.

[0837] Embodiment II-76. The compound of embodiment II-74, wherein W2 comprises a 2′-O-methoxyethyl 5-methylcytidine at position 20 of a sequence corresponding to SEQ ID NO: 2.

[0838] Embodiment II-77. The compound of any one of embodiments II-1 to II-76, wherein W2 comprises a nucleoside comprising a 2′-O-methyl sugar modification.

[0839] Embodiment II-78. The compound of embodiment II-77, wherein the 2′-O-methyl sugar modification is at positions 15, 16, 17, 18, 19 and/or 20 of a sequence corresponding to SEQ ID NO: 2.

[0840] Embodiment II-79. The compound of embodiment II-77, wherein W2 comprises a 2′-O-methyl 5-methylcytidine at position 20 of a sequence corresponding to SEQ ID NO: 2.

[0841] Embodiment II-80. The compound of any one of embodiments II-1 to II-79, wherein W2 comprises a nucleoside comprising a 2′-fluoro sugar modification.

[0842] Embodiment II-81. The compound of any one of embodiments II-1 to II-80, wherein W2 comprises a nucleoside comprising a 2′-fluoro-arabinonucleic acid (2′-fluoro-ANA) modification.

[0843] Embodiment II-82. The compound of any one of embodiments II-1 to II-81, wherein W2 comprises a modified nucleoside and wherein the modified nucleoside is a glycol nucleic acid (GNA).

[0844] Embodiment II-83. The compound of any one of embodiments II-1 to II-82, wherein W2 comprises a modified nucleoside and wherein the modified nucleoside is a locked nucleic acid (LNA).

[0845] Embodiment II-84. The compound of embodiment II-83, wherein the LNA is at positions 16, 17, 18, 19 and/or 20 of a sequence corresponding to SEQ ID NO: 2.

[0846] Embodiment II-85. The compound of any one of embodiments II-1 to II-84, wherein at least one internucleoside linkage is a phosphodiester linkage.

[0847] Embodiment II-86. The compound of any one of embodiments II-1 to II-85, wherein at least one internucleoside linkage is a modified internucleoside linkage.

[0848] Embodiment II-87. The compound of embodiment II-86, wherein the modified internucleoside linkage is a phosphorothioate internucleoside linkage.

[0849] Embodiment II-88. The compound of any one of embodiments II-1 to II-86, wherein the oligonucleotide is complementary to a portion of the polynucleotide sequence of a HBV genome.

[0850] Embodiment II-89. The compound of embodiment II-88, wherein the HBV genome is the genome of HBV GT-A, GT-B, GT-C, GT-D, GT-E, GT-F, GT-G, or GT-H.

[0851] Embodiment II-90. The compound of embodiment II-88, wherein the oligonucleotide is at least 60%, 65%, 70%, 75%, 80%, 85%, 90%, 91%, 92%, 93%, 94%, 95%, 96%, 97%, 98%, 99% or 100% complementary to a portion of the polynucleotide sequence of any one of SEQ ID NOS: SEQ ID NO 3, and 667-674.

[0852] Embodiment II-91. The compound of embodiment II-88, wherein the oligonucleotide is complementary to the polynucleotide sequence of any one of SEQ ID NOs: 1, 4, and 675-838.

[0853] Embodiment II-92. The compound of any one of embodiments II-1 to II-91, wherein the oligonucleotide comprises a nucleobase sequence of a sequence corresponding to SEQ ID NO: 2 or a nucleobase sequence of.

[0854] Embodiment II-93. A compound comprising the modified oligonucleotide of any one of SEQ ID NOS: 11-666, or a oligonucleotide comprising at least 1, 2, 3, 4, or 5 further modifications thereto.

[0855] Embodiment II-94. A compound comprising the modified oligonucleotide of any one of SEQ ID NOS: 11-666, or a oligonucleotide having at least 70%, at least 80%, at least 90%, at least 95%, or at least 99% sequence identity thereto.

[0856] Embodiment II-95. A pharmaceutical composition comprising the compound of any one of embodiments II-1 to II-94, or salt thereof and at least one pharmaceutically acceptable carrier or diluent.

[0857] Embodiment II-96. A formulation comprising about 100 mg/mL, 150 mg/mL, or 200 mg/mL of a compound comprising the modified oligonucleotide sequence of SEQ ID NO: 456, or a oligonucleotide comprising at least 1, 2, 3, 4, or 5 further modifications thereto.

[0858] Embodiment II-97. A method of reducing HBV antigen levels in a subject comprising administering to the subject the compound of any one of embodiments II-1 to II-94, the composition of embodiment II-95 or the formulation of embodiment II-96.

[0859] Embodiment II-98. The method of embodiment II-97, wherein the HBV antigen is HBsAg or HBeAg.

[0860] Embodiment II-99. The method of embodiment II-97, wherein HBeAg levels are reduced.

[0861] Embodiment II-100. The method of embodiment II-97, wherein HBsAg levels are reduced.

[0862] Embodiment II-101. The method of embodiment II-97, wherein, wherein the HBsAg levels are reduced by at least about 1.25 fold relative to a subject administered with a composition comprising the modified oligonucleotide sequence of SEQ ID NO: 10.

[0863] Embodiment II-102. The method of embodiment II-97, wherein the HBsAg levels are reduced by about 2 fold to about 10 fold relative to a subject administered with a composition comprising the modified oligonucleotide sequence of SEQ ID NO: 10.

[0864] Embodiment II-103. A method of reducing liver toxicity and/or persistence in a subject having HBV comprising administering to a subject the compound of any one of embodiments II-1 to 94, the composition of embodiment II-95 or the formulation of embodiment II-96.

[0865] Embodiment II-104. The method of embodiment II-103, wherein ALT, ALP, and/or AST levels are reduced, optionally by at least about 1.25 fold relative to a subject administered with a composition comprising the modified oligonucleotide sequence of SEQ ID NO: 10.

[0866] Embodiment II-105. A method of preventing, treating, ameliorating or slowing the progression of a HBV-related disease, disorder or condition comprising administering to a subject the compound of any one of embodiments II-1 to II-94, the composition of embodiment II-95 or the formulation of embodiment II-96.

[0867] Embodiment II-106. The method of any one of embodiments II-97 to II-105, wherein the subject is administered with at least one, at least 2, at least 3, at least 4 or at least 5 doses of the compound, the composition or the formulation.

[0868] Embodiment II-107. The method of any one of embodiments II-97 to II-106, wherein the subject is dosed on Day 1, Day 4 and Day 8.

[0869] Embodiment II-108. The method of embodiment II-107, wherein the subject is dosed once every week after Day 8.

[0870] Embodiment II-109. The method of any one of embodiments II-97 to II-108, wherein the subject is dosed on at least Day 1, Day 4 and Day 8, Day 15 and Day 22.

[0871] Embodiment II-110. The method of any one of embodiments II-107 to II-109, wherein the amount of each dose is substantially the same amount.

[0872] Embodiment II-111. The method of any one of embodiments II-97 to II-110, wherein the dose is about 30 mg to about 600 mg.

[0873] Embodiment II-112. The method of any one of embodiments II-97 to II-110, wherein the dose is about 100 mg to about 500 mg.

[0874] Embodiment II-113. The method of any one of embodiments II-97 to II-110, wherein the dose is about 100 mg, about 150 mg, about 200 mg, about 250 mg, about 300 mg, about 450 mg, or about 500 mg.

[0875] Embodiment II-114. The method of any one of embodiments II-97 to II-113, wherein the administering to a subject is parenteral.

[0876] Embodiment II-115. The method of any one of embodiments II-97 to II-113, wherein the administering to a subject is subcutaneous.

[0877] Embodiment II-116. The method of any one of embodiments II-97 to II-113, wherein the administering to a subject is transdermal.

[0878] Embodiment II-117. The method of any one of embodiments II-97 to II-113, wherein the administering to a subject is intraocular.

[0879] Embodiment II-118. The method of any one of embodiments II-97 to II-113, wherein the administering to a subject is intramuscular.

[0880] Embodiment II-119. The method of any one of embodiments II-97 to II-113, wherein the administering to a subject is intravenous.

[0881] Embodiment II-120. The method of any one of embodiments II-97 to II-115, wherein the method further comprises administering at least a second agent to the subject.

[0882] Embodiment II-121. The method of any one of embodiments II-97 to II-120, wherein the disease, disorder or condition is a liver disease, disorder or condition.

[0883] Embodiment II-122. The method of embodiment II-121, wherein the disease, disorder or condition is jaundice, liver inflammation, liver fibrosis, inflammation, liver cirrhosis, liver failure, diffuse hepatocellular inflammatory disease, hemophagocytic syndrome, serum hepatitis, HBV infection, HBV viremia, or liver disease-related transplantation.

[0884] Embodiment II-123. The method of embodiment II-121, wherein the disease or condition is a hyperproliferative condition, optionally liver cancer.

[0885] Embodiment II-124. The method of any one of embodiments II-97 to II-120, wherein the disease, disorder or condition is a hepatitis delta virus infection (HDV), wherein the subject is co-infected with HBV.

[0886] Embodiment II-125. The method of any one of embodiments II-97 to II-124, wherein the subject is human.

### EXAMPLES

### Non-Limiting Disclosure and Incorporation by Reference

[0887] While certain compounds, compositions and methods described herein have been described with specificity in accordance with certain embodiments, the following examples serve only to illustrate the compounds described herein and are not intended to limit the same. Each of the references recited in the present application is incorporated herein by reference in its entirety.

### Example 1: Modified Oligonucleotide Sequences and Methods of Making

[0888] Structures of the modified oligonucleotides of the invention (alternatively known as enhanced AntiSense Oligonucleotides [eASO]) are shown in Tables 1.1 and Table 1.2 (FIGS. 1-2). Table 1.1 shows a legend describing the individual modifications at each position of the modified oligonucleotides. Table 1.2 shows the sequence of each modified oligonucleotides, aligned by position number.

[0889] Synthesis: Using solid-phase synthesis to produce an oligonucleotide. This means that oligonucleotides will be tethered to a solid surface when they are being made. In other words, within the solid-phase synthesis, an oligonucleotide being assembled is covalently bound, via its 3′-terminal hydroxyl group, to solid support material and remains attached to it over the entire course of the chain assembly. This synthesis process begins with the 3′-most nucleotide and proceeds through a series of cycles composed of four steps that are repeated until the 5′-most nucleotide is attached. These four steps are deprotection (A), condensation (B), capping (C), and oxidation (D) are shown in FIG. 3 and stated below:
[0890] Step 1: Remove the DMTr attached to the 5′—OH group of the first base on the CPG monomer, and prepare to attach the next new base;
[0891] Step 2: Activate the new base monomer and prepare to react with the first base;
[0892] Step 3: The second base has a coupling reaction with the first base;
[0893] Step 4: Cap the 5′-OH of the first base that has not reacted so that it will no longer participate in the reaction;
[0894] Step 5: Oxidation of nucleoside phosphites to more stable nucleoside phosphates;
[0895] Step 6: Repeat the cycle of Step1˜Step5 until the required Oligo DNA sequence is synthesized.

[0896] Aminolysis—The synthesized oligonucleotide is chemically cleaved from the solid carrier (CPG), and the protective group is removed by aminolysis.

[0897] Purification—The modified primer purification method is as follows:
[0898] (1) PAGE purification: use denaturing polyacrylamide gel electrophoresis to separate the primer DNA then the target DNA is recovered from the gel. The purity of the purified DNA is greater than 90%.
[0899] (2) HPLC purification: use the principle of high performance liquid chromatography to purify the primer DNA to a purity greater than 90%.

### Example 2: Antiviral Effect of Modified Oligonucleotides in HepG2.2.15 Cells

[0900] The antiviral effect of modified oligonucleotides was evaluated by measuring the levels of hepatitis B virus (HBV) surface antigen (HBsAg) and HBV e antigen (HBeAg) in HepG2.2.15 cells. The modified oligonucleotides used in this study included AUS1233/AUS1138, AUS1463, AUS1476/AUS1493, AUS1494, AUS1466/AUS1495.

[0901] HepG2.2.15 cells that can stably express HBsAg and HBeAg were purchased from China Center for Type Culture Collection (CCTCC No. GDC0141). The modified oligonucleotide solutions were prepared by dissolving each compound in saline or RNase-free double distilled H₂O (dd H₂O) to make a target solution at 50 μM.

[0902] The modified oligonucleotides worked with HepG2.2.15 cells by reverse transfection. First, a cell suspension with a concentration of 3.5*10⁵ cells in every 100 μl suspension was prepared. The cell culture plate was covered with 30-50 μl Collagen I, Rat Tail (3 mg/mL) (Gibco) in every well. Excess liquid was removed one hour later. P3000 (Invitrogen) and Lipofectamine® 3000 Reagent (Invitrogen) were then diluted with Opti-MEM™ I Reduced Serum Medium (Gibco), mixed with the diluted compound, and then allowed to stand at room temperature for 10 minutes. 10 μl of transfection reagent mixture of P3000, Lipo3000 and Opti-MEM and 100 μl of cell suspension were added to each well. The mixture was pipetted 4 or 5 times and the plate was placed in a 37° C. incubator.

[0903] HBsAg levels in the cell supernatant were measured using HBsAg ELISA kits (Lot number: 20201116) were purchased from Autobio Diagnostics (China). HBsAg level was measured according to manufacturer's instructions.

[0904] Cell proliferation-toxicity was measured by CCK8 kits. Briefly, the cell supernatant was removed carefully 48 hours after modified oligonucleotide treatment. 100 μl CCK-8 solution according to manufacturer's instructions were added to each well. The plate was placed in a 37° C. incubator for 60 min or 90 min and the absorbance value in each sample was measured by an enzyme-label analyzer (Perlong DNM-9602).

[0905] Data for the compounds are provided. The EC50 was 1.45 (nM)+0.21 for AUS1233/AUS1138, 0.32±0.11 for AUS1463, 0.28±0.09 for AUS1494, 0.24±0.07 for AUS1476/AUS1493, 0.54±0.21 for AUS1466/AUS1495, the CC50 (nM) was 61.98±9.32 for AUS1233, AUS1138, 57.61±6.14 for AUS1463, 72.91±9.95 for AUS1494, 74.73±8.67 for AUS1476/AUS1493, 72.36±11.77 for AUS1466/AUS1495. AUS1463, AUS1494, AUS1476/AUS1493, AUS1466/AUS1495 reduce HBV antiviral activity EC50 (nM) value is 2.5˜4 fold lower than AUS1233/AUS1138 and have similar cellular toxicity value CC50 (nM) as AUS1233/AUS1138.

| | | | | AUS1476/ | AUS1466/ |
|---|---|---|---|---|---|
| Compounds | AUS1233/AUS1138 | AUS1463 | AUS1494 | AUS1493 | AUS1495 |
| EC50 (nM) | 1.45 ± 0.21 | 0.32 ± 0.11 | 0.28 ± 0.09 | 0.24 ± 0.07 | 0.54 ± 0.21 |
| CC50 (nM) | 61.98 ± 9.32 | 57.61 ± 6.14 | 72.91 ± 9.95 | 74.73 ± 8.67 | 72.36 ± 11.77 |

### Example 3: Antiviral Effect of Modified Oligonucleotides in Genotype C HBV Transgenic Mice

[0906] This study evaluated the effect of modified oligonucleotides on the serum levels of HBsAg in genotype C HBV (HBV-GTC) transgenic mice. The modified oligonucleotides used in this study included AUS1233/AUS1138, AUS1463, AUS1466/AUS1495, AUS1494, AUS1476/AUS1493, and AUS1441. Each compound was dosed once at 30 mg/kg by subcutaneous injection (SC) to the mice. Normal saline and AUS1233, AUS1138 were administered as negative control and positive control, respectively.

[0907] This study evaluated the effect of modified oligonucleotides on the serum levels of HBsAg in genotype C HBV (HBV-GTC) transgenic mice. The modified oligonucleotides used in this study included AUS1233/AUS1138, AUS1463, AUS1466/AUS1495, AUS1494, AUS1476/AUS1493, and AUS1441. Each compound was dosed once at 30 mg/kg by subcutaneous injection (SC) to the mice. Normal saline and AUS1233, AUS1138 were administered as negative control and positive control, respectively.

[0908] HBV transgenic mice, prepared from male C57BL/6 mice of 5-7 weeks old with 1.0-fold length of HBV C₁ subtype genome, stably express HBsAg in liver. The methods and purposes of animal experiments are in accordance with the ethical standards and international practices.

[0909] AUS1233/AUS1138 was used as a reference compound in this study. HBsAg ELISA kits were purchased from Autobio Diagnostics. ELISA was performed using a chemiluminescence immunoassay analyzer (Instrument model: LUMO) at Autobio. Centrifugation of blood was performed with a Preparative Ultracentrifuge by Thermo Fisher Scientific (USA).

[0910] The dosing solutions were prepared by dissolving each compound in saline to make a stock solution at 10 mg/ml, which was diluted with saline again at a target concentration of 3 mg/ml.

[0911] Animal Dosing—The overall study design is shown in the FIG. 4. Male HBV transgenic mice were randomly divided into groups of 4 mice. Each group was dosed with one compound by subcutaneous injection at 30 mg/kg and a dose volume of 10 ml/kg of body weight or an equal volume of normal saline as control.

[0912] Approximately 80 μl of blood sample was taken from a thigh vein on 0 (before dosing), 3, 7, 10, 14, 21 and 28 days after dosing. Blood samples were placed in an incubator at 37° C. for approximately 30 minutes, and then centrifuged in a precooled (0-4° C.) centrifuge to obtain the serum samples. The obtained serum samples were stored in a −20° C. refrigerator for further analysis.

[0913] Serum HBsAg levels in the serum samples were measured using HBsAg ELISA kits (Lot number: 20201116) were purchased from Autobio Diagnostics. Briefly, 50 μl of 10-fold diluted mouse serum or standards was added to a 96-well plate, HBsAg level was measured according to manufacturer's instructions.

[0914] The HBsAg levels were measured in the serum samples by ELISA. The maximum log 10 serum HBsAg reduction was −0.494±0.173 for AUS1233, AUS1138, −1.66±0.52 for AUS1463,−1.43±0.12 for AUS1466/AUS1495, −1.22±0.39 for AUS1494, −1.47±0.26 for AUS1476/AUS1493, and −1.48±0.27 for AUS1441. The body weight change was comparable with the saline group for all treatment groups. The results showed that the antiviral effects of the present modified oligonucleotides were much better than the AUS1233, AUS1138.

### Example 4: Antiviral Effect of Modified Oligonucleotides in genotypeD HDI-HBV Carrier Mice

[0915] This study evaluated the effect of modified oligonucleotides on the serum levels of HBsAg in HDI HBV mice. HBV HDI mice model based on the hydrodynamic injection of PreS2/S plasmid into male C57BL/6 mice. The modified oligonucleotides used in this study included AUS1233/AUS1138, AUS1468, AUS1469, AUS1470, AUS1471, AUS1472, AUS1458, AUS1459, AUS1426, AUS1427/AUS1461, AUS1462, AUS1463, AUS1464, AUS1465, AUS1466/AUS1495, and AUS1467. Each compound was dosed once at 40 mg/kg by SC. Normal saline and AUS1233, AUS1138 were administered as negative control and positive control, respectively. The HBsAg levels and serum alanine aminotransferase (ALT) levels were measured in the serum samples by ELISA.

[0916] This study evaluated the effect of modified oligonucleotides on the serum levels of HBsAg in HDI HBV mice. HBV HDI mice model based on the hydrodynamic injection of PreS2/S plasmid into male C57BL/6 mice. The modified oligonucleotides used in this study included AUS1233/AUS1138, AUS1468, AUS1469, AUS1470, AUS1471, AUS1472, AUS1458, AUS1459, AUS1426, AUS1427/AUS1461, AUS1462, AUS1463, AUS1464, AUS1465, AUS1466/AUS1495, and AUS1467. Each compound was dosed once at 40 mg/kg by SC. Normal saline and AUS1233, AUS1138 were administered as negative control and positive control, respectively. The HBsAg levels and serum alanine aminotransferase (ALT) levels were measured in the serum samples by ELISA.

[0917] HBsAg ELISA kits were purchased from Autobio Diagnostics (China). ALT ELISA kits were purchased from Elabscience Biotechnology Co., Ltd (China). Normal saline was purchased from Beijing Sanyao Science & Technology Development (China). ELISA was performed using Chemiluminescence immunoassay analyzer of Autobio. Centrifugation of blood was performed with a Preparative Ultracentrifuge of Thermo Fisher Scientific (USA).

[0918] The dosing solutions were prepared by dissolving each compound in saline to make a stock solution at 10 mg/ml, which was diluted with saline again at a target concentration of 4 mg/ml.

[0919] Animal Dosing—The overall study design is shown in FIG. 5. Male HDI-HBV carrier mice were randomly divided into every group. Each group was dosed with one compound at 40 mg/kg and a dose volume of 10 ml/kg of body weight or an equal volume of normal saline as control. HBsAg-positive mice were dosed 28 days after HDI modeling at the animal laboratory of Eyoung via SC.

[0920] Approximately 80 μl of blood sample was taken from a thigh vein on 0 (before dosing), 3, 7, 14 and 21 days after dosing. Blood samples were placed in an incubator at 37° C. for approximately 30 minutes, and then centrifuged in a precooled (0-4° C.) centrifuge to obtain the serum samples. The obtained serum samples were stored in a −20° C. refrigerator for further analysis.

[0921] Serum HBsAg levels in the serum samples were measured using HBsAg ELISA kits (Lot number: 20201116) were purchased from Autobio Diagnostics (China). Briefly, 50 μl of 25-fold diluted mouse serum or standards was added to a 96-well plate, HBsAg level was measured according to manufacturer's instructions.

[0922] Serum ALT levels were measured using ALT ELISA kits (Number: E-BC-K235-M) were purchased from Elabscience Biotechnology Co., Ltd (China). Briefly, 50 μl of 2-fold diluted mouse serum or standards was added to a 96-well plate, HBsAg level was measured according to manufacturer's instructions.

[0923] The maximum log 10 serum HBsAg reduction was 1.03±0.23 for AUS1233/AUS1138, and was 2.29±0.25 for AUS1468, 2.26±0.46 for AUS1469, 2.30±0.39 for AUS1470, 2.59±0.39 for AUS1471, 2.59±0.26 for AUS1472, 2.82±0.72 for AUS1458, 2.46±0.52 for AUS1459, 2.57±0.42 for AUS1426, 2.51±0.37 for AUS1427/AUS1461, 2.12±0.21 for AUS1462, 2.03±0.14 for AUS1463, 2.77±1.22 for AUS1464, 2.33±1.10 for AUS1465, 1.90±0.10 for AUS1466/AUS1495 and 1.96±0.35 for AUS1467. The serum ALT levels were <42 IU/L in all samples for all compounds, indicated the liver were not damaged. The body weight change was comparable with the saline group for all treatment groups.

### Example 5: Acute Toxic Effect of Modified Oligonucleotides in C57BL/6 Mice

[0924] This study evaluated the acute toxic effect of modified oligonucleotides on the serum alanine aminotransferase (ALT) and aspartate aminotransferase (AST) levels in C57BL/6 mice. The modified oligonucleotides used in this study included AUS1233/AUS1138, AUS1472, AUS1427/AUS1461, AUS1463. Each compound was dosed three times on Day 0, 2, and 4 at 60 mg/kg by subcutaneous injection (SC). Normal saline was used as a negative control. The blood routine was measured in the whole blood samples by HITACHI AUTOMATIC ANALYZER 3100. The alanine aminotransferase (ALT) and aspartate aminotransferase (AST) levels were measured in the serum samples by enzyme-linked immune-sorbent assays (ELISA).

[0925] Male C57BL/6 mice were purchased from Shanghai SLAC Laboratory Animal CO., Ltd (China). The mice were maintained under specific pathogen-free condition in the BSL-2+ animal facility of Hagnzhou Eyoung Biotechnology Co., Ltd (China). The methods and purposes of animal experiments are in accordance with the ethical standards and international practices.

[0926] ALT and AST ELISA kits were purchased from Elabscience Biotechnology Co., Ltd (China). Normal saline was purchased from Beijing Sanyao Science & Technology Development (China). ELISA was performed using Enzyme Immunoassay Analyzer of Autobio. Centrifugation of blood was performed with a Preparative Ultracentrifuge of Thermo Fisher Scientific (USA).

[0927] The dosing solutions were prepared by dissolving each compound in saline to make a stock solution at 10 mg/ml, which was diluted with saline again at a target concentration of 6 mg/ml.

[0928] The overall study design is shown in FIG. 6. Male C57BL/6 mice were randomly divided into every group. Each compound was dosed three times on Day 0, 2, and 4 at 60 mg/kg by SC and a dose volume of 10 μl/g of body weight or an equal volume of normal saline as control.

[0929] Approximately 80 μl of blood sample was taken from a thigh vein on 5, 7, 10, 14, 17 and 21 days after dosing. Blood samples were placed in an incubator at 37° C. for approximately 30 minutes, and then centrifuged in a precooled (0-4° C.) centrifuge to obtain the serum samples. The obtained serum samples were stored in a −20° C. refrigerator for further analysis. Approximately 50 μl of blood sample was taken from a thigh vein on Day 17 after dosing. Blood samples were anticoagulated by EDTA-2Na anticoagulant and diluted. The obtained anticoagulant blood dilution samples were stored in a 4° C. refrigerator for blood routine analysis.

[0930] Serum ALT levels were measured using ALT ELISA kits (Number: E-BC-K235-M) were purchased from Elabscience Biotechnology Co., Ltd (China). Briefly, 50 μl of 2-fold diluted mouse serum or standards was added to a 96-well plate, HBsAg level was measured according to manufacturer's instructions.

[0931] The maximum serum ALT was 53.3 (IU/L)±16.0 for AUS1233/AUS1138, 29.3±8.2 for AUS1472, 44.9±22.0 for AUS1427/AUS1461, 16.1±4.8 for AUS1463. The maximum serum AST (IU/L) was 27.4±7.9 for AUS1233/AUS1138, 18.3±5.5 for AUS1472, 19.0±5.4 for AUS1427/AUS1461, 14.3±3.4 for AUS1463. The ratio of liver and spleen to body weight in all treatment groups was uncomparable with the saline group. The body weight change was comparable with the saline group for all treatment groups. The results of maximum serum ALT and AST show that the modified oligonucleotides have better drug safety than the AUS1233/AUS1138.

### Example 6: Antiviral Effect of Modified Oligonucleotides in pAAV-1.2HBV-GTA HDI-HBV Carrier Mice

[0932] This study evaluated the effect of modified oligonucleotides on the serum levels of HBsAg in HBV transgenic mice. The modified oligonucleotides used in this study included AUS1233/AUS1138, AUS1444, AUS1458, AUS1459, AUS1460, AUS1427/AUS1461, AUS1462, AUS1463, AUS1464, AUS1465, AUS1463, AUS1467, AUS1468, AUS1470, AUS1471, AUS1472, AUS1473, AUS1474, AUS1475, AUS1476/AUS1493, AUS1478, AUS1479, AUS1489, AUS1490, AUS1443, and AUS1322. Each compound was dosed once at 40 mg/kg by SC. Normal saline was administered as negative control. The HBsAg levels were measured in the serum samples by ELISA.

[0933] Male C57BL/6 mice were purchased from Shanghai SLAC Laboratory Animal CO., Ltd (China). The HDI-HBV mouse model was constructed by hydrodynamic-injection a pAAV-1.2HBV-GTA plasmid containing 1.2-fold length of HBV sequence. HBsAg-positive mice were used Day 18 after the injection. The mice were maintained under specific pathogen-free condition in BSL-2+ animal facility of Hagnzhou Eyoung biotechnology Co., Ltd (China). The methods and purposes of animal experiments are in accordance with the ethical standards and international practices.

[0934] AUS1233/AUS1138 was used as a reference compound in this study. HBsAg ELISA kits were purchased from Autobio Diagnostics (China). Normal saline was purchased from Beijing Sanyao Science & Technology Development (China). ELISA was performed using Chemiluminescence immunoassay analyzer (Instrument model: LUMO) of Autobio. Centrifugation of blood was performed with a Preparative Ultracentrifuge of Thermo Fisher Scientific (USA).

[0935] The dosing solutions were prepared by dissolving each compound in saline to make a stock solution at 10 mg/ml, which was diluted with saline again at a target concentration of 4 mg/ml.

[0936] Animal Dosing: The overall study design is shown in FIG. 7. Male HDI-HBV carrier mice were randomly divided into each group. Each group was dosed with one compound at 40 mg/kg and a dose volume of 10 ml/kg of body weight or an equal volume of normal saline as control. HBsAg-positive mice were dosed 18 days after HDI modeling at the animal laboratory of Eyoung via SC.

[0937] Approximately 80 μl of blood sample was taken from a thigh vein on 0 (before dosing), 3, 7, 10, 14 and 21 days after dosing. Blood samples were placed in an incubator at 37° C. for approximately 30 minutes, and then centrifuged in a precooled (0-4° C.) centrifuge to obtain the serum samples. The obtained serum samples were stored in a −20° C. refrigerator for further analysis.

[0938] Serum HBsAg levels in the serum samples were measured using HBsAg ELISA kits (Lot number: 20201116) were purchased from Autobio Diagnostics (China). Briefly, 50 μl of 25-fold diluted mouse serum or standards was added to a 96-well plate, HBsAg level was measured according to manufacturer's instructions.

[0939] The maximum log 10 serum HBsAg reduction was −0.774±0.111 for AUS1233/AUS1138, −3.61±1.65 for AUS1444, −2.72±1.24 for AUS1458, −1.27±0.21 for AUS1459, −2.06±1.78 for AUS1460, −1.21±0.35 for AUS1427/AUS1461, −2.09±2.23 for AUS1462, −2.06±0.05 for AUS1463, −1.70±1.39 for AUS1464, −2.09±1.70 for AUS1465, −1.38±0.53 for AUS1463, −2.80±2.11 for AUS1467, −0.844±0.262 for AUS1468, −0.910±0.259 for AUS1470, −0.814±0.156 for AUS1471, −1.95±1.60 for AUS1472, −1.87±1.82 for AUS1473, −1.59±1.73 for AUS1474, −3.06±0.85 for AUS1475, −2.79±1.63 for AUS1476/AUS1493, −1.16±0.94 for AUS1478, −0.903±0.164 for AUS1479, −1.64±0.18 for AUS1489, −1.58±1.15 for AUS1490, −2.94±0.78 for AUS1443, and −3.10±0.70 for AUS1322. The body weight change was comparable with the saline group for all treatment groups. The results showed that the antiviral effects of the modified oligonucleotides were much better than the AUS1233/AUS1138.

### Example 7: Acute Toxicity Test of Modified Oligonucleotides in C57BL/6 Mice

[0940] This study evaluated the acute toxic effect of modified oligonucleotides on the serum alanine aminotransferase (ALT) levels in C57BL/6 mice. The modified oligonucleotides used in this study included AUS1233/AUS1138, AUS1322, AUS1465, AUS1466/AUS1495, AUS1467, AUS1468, AUS1469, AUS1470, AUS1471, AUS1472, AUS1473, AUS1474, AUS1475, AUS1476/AUS1493, AUS1477, AUS1478, AUS1479, AUS1488/AUS1497, AUS1489, AUS1490. Each compound was dosed three times on Day 0, 2, and 4 at 60 mg/kg by SC. Normal saline was administered as negative control. The ALT levels were measured in the serum samples by enzyme-linked immune-sorbent assays (ELISA).

[0941] Male C57BL/6 mice were purchased from Shanghai SLAC Laboratory Animal CO., Ltd (China). The mice were maintained under specific pathogen-free condition in the BSL-2+ animal facility of Hagnzhou Eyoung Biotechnology Co., Ltd (China). The methods and purposes of animal experiments are in accordance with the ethical standards and international practices.

[0942] ALT ELISA kits were purchased from Elabscience Biotechnology Co., Ltd (China). Normal saline was purchased from Beijing Sanyao Science & Technology Development (China). ELISA was performed using Enzyme Immunoassay Analyzer of Autobio. Centrifugation of blood was performed with a Preparative Ultracentrifuge of Thermo Fisher Scientific (USA).

[0943] The dosing solutions were prepared by dissolving each compound in saline to make a stock solution at 10 mg/ml, which was diluted with saline again at a target concentration of 6 mg/ml.

[0944] The overall study design is shown in FIG. 8. Male C57BL/6 WT mice were randomly divided into each group. Each group was dosed with one compound of triple doses at 60 mg/kg and a dose volume of 10 ml/kg of body weight or an equal volume of normal saline as control. All mice were dosed at the animal laboratory of Eyoung via SC.

[0945] Approximately 80 μl of blood sample was taken from a thigh vein on 5, 7, 10, 14, 17 and 21 days after dosing. Blood samples were placed in an incubator at 37° C. for approximately 30 minutes, and then centrifuged in a precooled (0-4° C.) centrifuge to obtain the serum samples. The obtained serum samples were stored in a −20° C. refrigerator for further analysis.

[0946] The maximum serum ALT levels was 30.4±14.8 for AUS1233/AUS1138, 335±13 for AUS1322, 10.7±0.5 for S, 10.6±1.4 for AUS1466/AUS1495, 11.8±0.9 for AUS1467, 11.8±3.8 for AUS1468, 9.16±1.69 for AUS1469, 12.5±1.1 for AUS1470, 11.8±2.3 for AUS1471, 12.5±1.1 for AUS1472 16.6±8.3 for AUS1473, 12.8±2.5 for AUS1474, 13.5±2.4 for AUS1475, 14.7±2.6 for AUS1476/AUS1493, 15.1±1.1 for AUS1477 14.2±0.6 for AUS1478 13.1±3.7 for AUS1479, 10.3±1.3 for AUS1488/AUS1497, 14.6±4.5 for AUS1489, 58.4±13.5 for AUS1490. The body weight change was comparable with the saline group for all treatment groups except AUS1322. AUS1322 declined on Day 14 for 3.75%. The results of the maximum serum ALT levels show that the safety of the modified oligonucleotides are much better than the AUS1233/AUS1138.

### Example 8: Antiviral Effect of Modified Oligonucleotides in pcDNA3.1-preS2-GTD HDI-HBV Mice

[0947] This study evaluated the effect of modified oligonucleotides on the serum levels of HBsAg in HDI-HBV GTD carrier mice. The modified oligonucleotides used in this study included AUS1233/AUS1138, AUS1463, AUS1476/AUS1493. Each compound was dosed once at 15 or 45 mg/kg by SC. Normal saline was administered as negative control. The HBsAg levels were measured in the serum samples by ELISA.

[0948] Male C57BL/6 mice were purchased from Shanghai SLAC Laboratory Animal CO., Ltd (China). The HDI-HBV mouse model was constructed by hydrodynamic-injection a pcDNA3.1-preS2-GTD plasmid containing preS2 of HBV sequence. HBsAg-positive mice were used Day 23 after the injection. The mice were maintained under specific pathogen-free conditions in the BSL-2+ animal facility of Hagnzhou Eyoung biotechnology Co., Ltd (China). The methods and purposes of animal experiments are in accordance with the ethical standards and international practices.

[0949] HBsAg ELISA kits were purchased from Autobio Diagnostics (China). Normal saline was purchased from Beijing Sanyao Science & Technology Development (China). ELISA was performed using Chemiluminescence immunoassay analyzer (Instrument model: LUMO) of Autobio. Centrifugation of blood was performed with a Preparative Ultracentrifuge of Thermo Fisher Scientific (USA).

[0950] The dosing solutions were prepared by dissolving each compound in saline to make a stock solution at 10 mg/ml, which was diluted with saline again at a target concentration of 1.5 and 4.5 mg/ml.

[0951] The overall study design is shown in FIG. 9. Male HDI-HBV GTD carrier mice were randomly divided into each group. Each group was dosed with one compound at 15 or 45 mg/kg and a dose volume of 10 ml/kg of body weight or an equal volume of normal saline as control. HBsAg-positive mice were dosed 23 days after HDI modeling at the animal laboratory of Eyoung via SC.

[0952] Approximately 80 μl of blood sample was taken from a thigh vein on 0 (before dosing), 3, 7, 10, 14, 21 and 26 days after dosing. Blood samples were placed in an incubator at 37° C. for approximately 30 minutes, and then centrifuged in a precooled (0-4° C.) centrifuge to obtain the serum samples. The obtained serum samples were stored in a −20° C. refrigerator for further analysis.

[0953] Serum HBsAg levels in the serum samples were measured using HBsAg ELISA kits (Lot number: 20201116) were purchased from Autobio Diagnostics (China). Briefly, 50 μl of 25-fold diluted mouse serum or standards was added to a 96-well plate, HBsAg level was measured according to manufacturer's instructions.

[0954] The maximum log 10 serum HBsAg reduction was −0.482±0.153 log 10 for AUS1233/AUS1138 (15), −0.917±0.258 for AUS1463 (15), −0.891±0.107 for AUS1476/AUS1493 (15), −1.95±1.13 for AUS1233/AUS1138 (45), −2.04±0.28 for AUS1463 (45), and −1.86±0.19 for AUS1476/AUS1493 (45). The body weight change was comparable with the saline group for all treatment groups. The results showed that the antiviral effects of modified oligonucleotides (AUS1463 & AUS1476/AUS1493) were equal or better than the AUS1233/AUS1138 in GTD HDI-HBV mice.

### Example 9: Antiviral Effect of Modified Oligonucleotides in pcDNA3.1-preS2-GTA HDI-HBV Carrier Mice

[0955] This study evaluated the effect of modified oligonucleotides on the serum levels of HBsAg in HDI-HBV carrier mice. The modified oligonucleotides used in this study included AUS1233/AUS1138 & AUS1476/AUS1493. Each compound was dosed once at 15 or 45 mg/kg by SC. Normal saline was administered as negative control. The HBsAg levels were measured in the serum samples by ELISA.

[0956] Male C57BL/6 mice were purchased from Shanghai SLAC Laboratory Animal CO., Ltd (China). The HDI-HBV mouse model was constructed by hydrodynamic-injection a pcDNA3.1-preS2-GTA plasmid containing preS2 of HBV sequence. HBsAg-positive mice were used Day 23 after the injection. The mice were maintained under specific pathogen-free condition in the BSL-2+ animal facility of Hagnzhou Eyoung Biotechnology Co., Ltd (China). The methods and purposes of animal experiments are in accordance with the ethical standards and international practices.

[0957] HBsAg ELISA kits were purchased from Autobio Diagnostics (China). Normal saline was purchased from Beijing Sanyao Science & Technology Development (China). ELISA was performed using Chemiluminescence immunoassay analyzer (Instrument model: LUMO) of Autobio. Centrifugation of blood was performed with a Preparative Ultracentrifuge of Thermo Fisher Scientific (USA).

[0958] The dosing solutions were prepared by dissolving each compound in saline to make a stock solution at 10 mg/ml, which was diluted with saline again at a target concentration of 1.5 and 4.5 mg/ml.

[0959] The overall study design is shown in FIG. 10. Male HDI-HBV carrier mice were randomly divided into each group. Each group was dosed with one compound at 15 or 45 mg/kg and a dose volume of 10 ml/kg of body weight or an equal volume of normal saline as control. HBsAg-positive mice were dosed 23 days after HDI modeling at the animal laboratory of Eyoung via SC.

[0960] Approximately 80 μl of blood sample was taken from a thigh vein on 0 (before dosing), 3, 7, 10, 14, 21 and 26 days after dosing. Blood samples were placed in an incubator at 37° C. for approximately 30 minutes, and then centrifuged in a precooled (0-4° C.) centrifuge to obtain the serum samples. The obtained serum samples were stored in a −20° C. refrigerator for further analysis.

[0961] Serum HBsAg levels in the serum samples were measured using HBsAg ELISA kits (Lot number: 20201116) were purchased from Autobio Diagnostics (China). Briefly, 50 μl of 20-fold diluted mouse serum or standards was added to a 96-well plate, HBsAg level was measured according to manufacturer's instructions.

[0962] The maximum log 10 serum HBsAg reduction was −0.304±0.077 log 10 for AUS1233/AUS1138 (15), −0.592±0.094 for AUS1476/AUS1493 (15), −0.842±0.127 for AUS1233, AUS1138 (45), and −1.76±0.10 for AUS1476/AUS1493 (45). The body weight change was comparable with the saline group for all treatment groups. The results showed that the efficacy of different doses of AUS1476/AUS1493 were better than the AUS1233/AUS1138 in GTA HDI-HBV carrier mice.

### Example 10: Antiviral Effect of Modified Oligonucleotides in Genotype a HBV Transgenic Mice

[0963] This study evaluated the effect of modified oligonucleotides on the serum levels of HBsAg in HBV transgenic mice. The modified oligonucleotides used in this study included AUS1233/AUS1138 and AUS1476/AUS1493. Each compound was dosed once at 45 mg/kg by SC. Normal saline and AUS1233/AUS1138 were administered as negative control and positive control, respectively. The HBsAg levels and HBeAg levels were measured in the serum samples by enzyme-linked immune-sorbent assays (ELISA). The maximum log 10 serum HBsAg reduction was −1.768±0.16 log 10 for AUS1233/AUS1138, and −2.483±0.27 for AUS1476/AUS1493. The body weight change was comparable with the saline group for all treatment groups.

[0964] HBV transgenic mice, prepared from male and female C57BL/6 mice of 5-7 weeks old with 1.2-fold length of HBV A subtype genome, stably express HBsAg in liver. The mice were obtained from Xiamen University and bred under specific pathogen-free condition in the BSL-2+ animal facility of Zhejiang Chinese Medical University (China). The methods and purposes of animal experiments are in accordance with the ethical standards and international practices.

[0965] HBsAg ELISA kits were purchased from Autobio Diagnostics (China). HBeAg ELISA kits were purchased from Beijing BGI-BGIN Biotech (China). Normal saline was purchased from Beijing Sanyao Science & Technology Development (China). ELISA was performed using Chemiluminescence immunoassay analyzer (Instrument model: LUMO) of Autobio and Microplate reader of Pulangbio. Centrifugation of blood was performed with a Preparative Ultracentrifuge of Thermo Fisher Scientific (USA).

[0966] The dosing solutions were prepared by dissolving each compound in saline to make a stock solution at 10 mg/ml, which was diluted with saline again at a target concentration of 4.5 mg/ml.

[0967] The overall study design is shown in FIG. 11. Male and female HBV transgenic mice were randomly divided into each group. Each group was dosed with one compound at 45 mg/kg and a dose volume of 10 ml/kg of body weight or an equal volume of normal saline as control. All mice were dosed at the animal laboratory of Eyoung via SC.

[0968] Approximately 80 μl of blood sample was taken from a thigh vein on 0 (before dosing), 3, 7, 10, 14, 21 and 29 days after dosing. Blood samples were placed in an incubator at 37° C. for approximately 30 minutes, and then centrifuged in a precooled (0-4° C.) centrifuge to obtain the serum samples. The obtained serum samples were stored in a −20° C. refrigerator for further analysis.

[0969] Serum HBsAg levels in the serum samples were measured using HBsAg ELISA kits (Lot number: 20201116) were purchased from Autobio Diagnostics (China). Briefly, 50 μl of 20-fold diluted mouse serum or standards was added to a 96-well plate, HBsAg level was measured according to manufacturer's instructions.

[0970] The maximum log 10 serum HBsAg reduction was −1.79±0.16 log 10 for AUS1233/AUS1138, −2.25±0.28 for AUS1463, and −2.21±0.27 for AUS1476/AUS1493. The results showed that the efficacy of AUS1476/AUS1493 is better than the AUS1233/AUS1138 in GTA HBV transgenic mice.

### Example 11: Antiviral Effect of Modified Oligonucleotides in AAV-HBV Carrier Mice (GTD)

[0971] This study evaluated the effect of modified oligonucleotides on the serum levels of HBsAg in AAV HBV mice. HBV HDI mice model based on the injection of AAV-HBV plasmid into male C57BL/6 mice. The modified oligonucleotides used in this study included AUS1233/AUS1138 and AUS1476/AUS1493. Each compound was dosed once at 15 mg/kg, 45 mg/kg and 90 mg/kg respectively by SC. Normal saline and AUS1233/AUS1138 were administered as negative control and positive control, respectively. The HBsAg, HBeAg and ALT levels was measured in the serum samples by ELISA. The HBV DNA levels was measured in the serum samples by real-time PCR using a Taqman probe.

[0972] Male AAV HBV-GTD C57BL/6 mice were from The First Hospital of Zhejiang University. The HDI-HBV mouse model was constructed by injection a 1×10¹¹ vg AAV-GTD plasmid containing HBV sequence. The mice were maintained under specific pathogen-free condition in the BSL-2+ animal facility of The First Hospital of Zhejiang University. The methods and purposes of animal experiments are in accordance with the ethical standards and international practices.

[0973] HBsAg ELISA kits were purchased from Autobio Diagnostics (China). ALT and AST ELISA kits were purchased from Elabscience Biotechnology Co., Ltd (China). Normal saline was purchased from Beijing Sanyao Science & Technology Development (China). ELISA was performed using Chemiluminescence immunoassay analyzer (Instrument model: LUMO) of Autobio. Centrifugation of blood was performed with a Preparative Ultracentrifuge of Thermo Fisher Scientific (USA).

[0974] The dosing solutions were prepared by dissolving each compound in saline to make a stock solution at 10 mg/ml, which was diluted with saline again at a target concentration of 1.5 mg/ml, 4.5 mg/ml and 9 mg/ml.

[0975] Animal Dosing. The overall study design is shown in FIG. 12. Male AAV-HBV carrier mice were randomly divided into each group. Mice were dosed with one compound at 15 mg/kg, 45 mg/kg and 90 mg/kg respectively. A dose volume of 10 ml/kg of body weight or an equal volume of normal saline as control.

[0976] Approximately 80 μl of blood sample was taken from a thigh vein on 0 (before dosing), 3, 7, 10, 14, 21 and 28 days after dosing. Blood samples were placed in an incubator at 37° C. for approximately 30 minutes, and then centrifuged in a precooled (0-4° C.) centrifuge to obtain the serum samples. The obtained serum samples were stored in a −20° C. refrigerator for further analysis.

[0977] Serum HBsAg levels in the serum samples were measured using HBsAg ELISA kits (Lot number: 20201116) were purchased from Autobio Diagnostics (China). Briefly, 50 μl of 20-fold diluted mouse serum or standards was added to a 96-well plate, HBsAg level was measured according to manufacturer's instructions.

[0978] The maximum log 10 serum HBsAg reduction was −0.413±0.309 log 10 for AUS1233/AUS1138 (15), −0.736±0.481 for AUS1476/AUS1493 (15), −1.274±0.456 for AUS1233/AUS1138 (45), −1.713±0.585 for AUS1476/AUS1493, −1.724±0.194 for AUS1233/AUS1138 (90), −2.394±0.408 for AUS1476/AUS1493. The results showed that the efficacy of AUS1476/AUS1493 is better than the AUS1233/AUS1138 in AAV-HBV carrier mice (GTD).

### Example 12: Acute Toxic Effect of Modified Oligonucleotides in C57BL/6 Mice

[0979] This study evaluated the acute toxic effect of modified oligonucleotides on the serum ALT and AST levels in C57BL/6 mice. The modified oligonucleotides used in this study included AUS1233/AUS1138, AUS1463, AUS1476/AUS1493. Each compound was dosed three times on Day 0, 2, and 4 at 60 mg/kg by SC. Normal saline was used as a negative control. The blood routine was measured in the whole blood samples by HITACHI AUTOMATIC ANALYZER 3100. The ALT and AST levels were measured in the serum samples by ELISA.

[0980] Male C57BL/6 mice were purchased from Shanghai SLAC Laboratory Animal CO., Ltd (China). The mice were maintained under specific pathogen-free condition in the BSL-2+ animal facility of Hagnzhou Eyoung Biotechnology Co., Ltd (China). The methods and purposes of animal experiments are in accordance with the ethical standards and international practices.

[0981] ALT and ELISA kits were purchased from Elabscience Biotechnology Co., Ltd (China). Normal saline was purchased from Beijing Sanyao Science & Technology Development (China). ELISA was performed using Enzyme Immunoassay Analyzer of Autobio. Centrifugation of blood was performed with a Preparative Ultracentrifuge of Thermo Fisher Scientific (USA).

[0982] The dosing solutions were prepared by dissolving each compound in saline to make a stock solution at 20 mg/ml, which was diluted with saline again at a target concentration of 6 mg/ml and 15 mg/ml.

[0983] Animal Dosing—The overall study design is shown in FIG. 13. Male C57BL/6 mice were randomly divided into each group. Each compound was dosed three times on Day 0, 2, and 4 at 60 mg/kg by subcutaneous injection (SC) and a dose volume of 10 μl/g of body weight or an equal volume of normal saline as control.

[0984] Approximately 80 μl of blood sample was taken from a thigh vein on 7, 14, 17, 21 and 27 days after dosing. Blood samples were placed in an incubator at 37° C. for approximately 30 minutes, and then centrifuged in a precooled (0-4° C.) centrifuge to obtain the serum samples. The obtained serum samples were stored in a −20° C. refrigerator for further analysis.

[0985] Approximately 50 μl of blood sample was taken from a thigh vein on Day 17 after dosing. Blood samples were anticoagulated by EDTA-2Na anticoagulant and diluted. The obtained anticoagulant blood dilution samples were stored in a 4° C. refrigerator for blood routine analysis.

[0986] Assays—Serum ALT levels were measured using ALT ELISA kits (Number: E-BC-K235-M) were purchased from Elabscience Biotechnology Co., Ltd (China). Briefly, 50 μl of 2-fold diluted mouse serum or standards was added to a 96-well plate, HBsAg level was measured according to manufacturer's instructions.

[0987] The results of serum ALT and AST levels show the present modified oligonucleotides have a higher safety level than the AUS1233/AUS1138.

### Example 13: Antiviral Effect of eASO Compounds in HepG2.2.15 Cells

[0988] The antiviral effect of eASO compounds was evaluated by measuring the levels of hepatitis B virus (HBV) surface antigen (HBsAg) and HBV e antigen (HBeAg) in HepG2.2.15 cells. The HBsAg levels were measured by chemiluminescence immunoassays, the HBeAg levels were measured by ELISA assays and cell viability was determined by MTT cell proliferation assay. The calculation result was expressed as mean and SD.

[0989] HepG2.2.15 cells that can stably express HBsAg and HBeAg were purchased from China Center for Type Culture Collection (CCTCC No. GDC0141). The eASO compound solutions were prepared by dissolving each compound in saline or RNase-free double distilled H2O (dd H2O) to make a target stock solution at 50 μM.

[0990] The eASO compounds were set in a series of concentrations (0, 0.037, 0.11, 0.34, 1, 3.1, 9.3, 27.8, 83.3, 250 nM) and worked with HepG2.2.15 cells by reverse transfection. First, the 96-well cell culture plate was covered with 50 μl Rat Tail Collagen I in every well and removed one hour later. Second, P3000 and Lipofectamine® 3000 Reagent was diluted with Opti-MEM™ reduced serum medium and mixed with the serial dilution compound solution, followed by incubation at room temperature for 10 minutes. Third, 10 μl of transfection reagent mixture of P3000, Lipo3000 and eASO and 100 μl of cell suspension with a concentration of 3.5*10⁵ cells were added to each well.

[0991] The mixture was pipetted 4 or 5 times and the plate was placed in a 37° C. incubator. After reverse transfection 24 h, the media was exchanged with fresh cell culture medium. Following a 48 h culture, supernatant was collected for detection. The remaining cells were used for cell viability test. The resulting data is represented in Table 14.1, as EC50 (nM) and MTT CC25 (nM). The EC50 (nM) ratio was calculated by dividing the EC50 value determined following the treatment with the modified oligonucleotide of any one of AUS1010 to AUS1714 (SEQ ID NOs: 11 to 666) by the EC50 value determined following the treatment with a reference oligonucleotide of AUS1233 (SEQ ID NO: 10). A lower EC50 ratio value suggests the increased ability of the modified oligonucleotide to decrease HBsAg levels relative to the reference oligonucleotide. The MTT CC25 (nM) ratio was calculated by dividing the MTT CC25 value determined following treatment with the modified oligonucleotide of any one of AUS1010 to AUS1714 (SEQ ID NOs: 11 to 666) by the MTT CC25 value determined following the treatment with a reference oligonucleotide of AUS1233 (SEQ ID NO: 10). A higher MTT CC25 ratio suggests an increased cellular viability relative to the reference oligonucleotide. The C/E ratio was calculated by dividing the MTT CC25 ratio value by the EC50 value. A higher C/E ratio suggests a balanced decrease in HBsAg levels while maintaining high cellular viability.

### Example 14: Antiviral Effect of eASO Compounds in HepG2.2.15 Cells

[0992] The antiviral effect of eASO compounds was evaluated by measuring the levels of hepatitis B virus (HBV) surface antigen (HBsAg) and HBV e antigen (HBeAg) in HepG2.2.15 cells. The HBsAg levels were measured by Chemiluminescence immunoassay assays, the HBeAg levels were measured by ELISA assays and cell viability was determined by CCK-8 cell proliferation assay. The calculation result was expressed as mean and SD.

[0993] HepG2.2.15 cells that can stably express HBsAg and HBeAg were purchased from China Center for Type Culture Collection (CCTCC No. GDC0141). The eASO compound solutions were prepared by dissolving each compound in saline or RNase-free double distilled H2O (dd H2O) to make a target stock solution at 50 μM.

[0994] The eASO compounds were set in a series of concentrations (0, 0.037, 0.11, 0.34, 1, 3.1, 9.3, 27.8, 83.3, 250 nM) and worked with HepG2.2.15 cells by reverse transfection. First, the 96-well cell culture plate was covered with 50 μl Rat Tail Collagen I in every well and removed one hour later. Second, P3000 and Lipofectamine® 3000 Reagent were diluted with Opti-MEM™ reduced serum medium and mixed with the serial dilution compound solution, and allowed to incubate at room temperature for 10 minutes. Third, 10 μl of transfection reagent mixture of P3000, Lipo3000 and eASO and 100 μl of cell suspension with a concentration of 3.5*10⁵ cells were added to each well. The mixture was pipetted 4 or 5 times and the plate was placed in a 37° C. incubator. After reverse transfection 24 h, media was exchanged with fresh cell culture medium. After 48 h supernatant was collected for HBsAg detection. For cell viability test, cell supernatant was removed after reverse transfection 48 h, and the CCK-8 reagent was added to detect the absorbance. The resulting data is represented in Table 14.1, EC50 (nM) ratio was calculated by dividing the EC50 value determined following the treatment with the modified oligonucleotide of any one of AUS1010 to AUS1714 (SEQ ID NOs: 11 to 666) by the EC50 value determined following the treatment with a reference oligonucleotide of AUS1233 (SEQ ID NO: 10). A lower EC50 ratio value suggests the increased ability of the modified oligonucleotide to decrease HBsAg levels relative to the reference oligonucleotide. The ratio of CCK8 CC30 was calculated by dividing the CCK8 CC30 value determined following treatment with the modified oligonucleotide of any one of AUS1010 to AUS1714 (SEQ ID NOs: 11 to 666) by the CCK8 CC30 value determined following the treatment with a reference oligonucleotide of AUS1233 (SEQ ID NO: 10). A higher CCK8 CC30 ratio suggests an increased cellular viability relative to the reference oligonucleotide. The C/E ratio was calculated by dividing the CCK8 CC30 ratio value by the EC50 value. A higher C/E ratio suggests a balanced decrease in HBsAg levels while maintaining high cellular viability.

TABLE 14.1
Antiviral effect of eASO compounds in HepG2.2.15 cells
by MMT and/or CCK8 proliferation assays

| SEQ | | | Ratio | |
|---|---|---|---|---|
| ID | | | MTT CC25 or | |
| NO: | ID | Ratio EC₅₀ | CCK8 CC30 | C/E ratio |
| 12 | AUS1011 | 2.9 | 0.1 | 0.050 |
| 13 | AUS1012 | >250 | >250 | |
| 14 | AUS1013 | 39.19 | >250 | |
| 15 | AUS1014 | >250 | >250 | |
| 16 | AUS1015 | 1.84 | >250 | |
| 18 | AUS1017 | 5.5 | 2.6 | 0.47 |
| 33 | AUS1036 | 10.75 | 2.30 | 0.21 |
| 34 | AUS1037 | 1.69 | 2.23 | 1.32 |
| 35 | AUS1038 | 1.53 | 1.39 | 0.9 |
| 36 | AUS1039 | 8.14 | 2.35 | 0.29 |
| 37 | AUS1042 | 2.38 | 1.57 | 0.66 |
| 38 | AUS1043 | 1.41 | 1.51 | 1.07 |
| 39 | AUS1044 | 2.47 | 1.09 | 0.44 |
| 40 | AUS1045 | 3.09 | 1.49 | 0.48 |
| 41 | AUS1046 | 3.65 | 2.13 | 0.58 |
| 42 | AUS1049 | 1.42 | 2.11 | 1.49 |
| 43 | AUS1050 | 0.90 | 1.65 | 1.83 |
| 44 | AUS1051 | 1.66 | 2.14 | 1.30 |
| 45 | AUS1052 | 1.54 | 1.18 | 0.77 |
| 46 | AUS1053 | 1.86 | 1.16 | 0.62 |
| 47 | AUS1054 | 2.16 | 0.89 | 0.41 |
| 48 | AUS1055 | 2.25 | 0.54 | 0.24 |
| 49 | AUS1056 | 2.32 | 1.51 | 0.65 |
| 50 | AUS1057 | 1.33 | 0.80 | 0.60 |
| 51 | AUS1058 | 1.64 | 0.95 | 0.58 |
| 52 | AUS1059 | 2.14 | 0.75 | 0.35 |
| 53 | AUS1060 | 2.19 | 1.33 | 0.61 |
| 54 | AUS1061 | 1.05 | 0.82 | 0.78 |
| 55 | AUS1062 | 2.84 | 2.09 | 0.74 |
| 56 | AUS1063 | 5.26 | 1.88 | 0.36 |
| 57 | AUS1064 | 6.19 | 2.45 | 0.40 |
| 58 | AUS1065 | 2.50 | 1.66 | 0.66 |
| 59 | AUS1066 | 2.50 | 2.28 | 0.91 |
| 60 | AUS1067 | 3.67 | 1.60 | 0.44 |
| 61 | AUS1068 | 2.61 | 1.50 | 0.57 |
| 62 | AUS1069 | 1.72 | 1.11 | 0.64 |
| 63 | AUS1070 | 1.90 | 1.43 | 0.75 |
| 64 | AUS1071 | 2.54 | 2.34 | 0.92 |
| 65 | AUS1072 | 2.80 | 2.36 | 0.84 |
| 66 | AUS1073 | 1.65 | 1.20 | 0.72 |
| 67 | AUS1074 | 3.41 | 1.03 | 0.30 |
| 68 | AUS1075 | 5.06 | | |
| 69 | AUS1076 | 1.55 | | |
| 70 | AUS1077 | 1.83 | | |
| 71 | AUS1078 | 2.66 | 1.26 | 0.48 |
| 72 | AUS1079 | 3.94 | 1.45 | 0.37 |
| 73 | AUS1081 | 2.95 | 1.20 | 0.41 |
| 74 | AUS1082 | 2.03 | 0.54 | 0.27 |
| 75 | AUS1083 | 1.98 | 0.69 | 0.35 |
| 76 | AUS1084 | 3.71 | >250 | |
| 77 | AUS1085 | 2.41 | >250 | |
| 78 | AUS1086 | 3.68 | >250 | |
| 79 | AUS1087 | 5.59 | >250 | |
| 80 | AUS1088 | 4.93 | >250 | |
| 81 | AUS1089 | 2.81 | >250 | |
| 82 | AUS1090 | 2.07 | >250 | |
| 83 | AUS1091 | 2.08 | 0.94 | 0.45 |
| 84 | AUS1092 | 9.62 | >250 | |
| 85 | AUS1093 | 7.07 | >250 | |
| 86 | AUS1094 | 2.83 | >250 | |
| 87 | AUS1095 | 2.42 | >250 | |
| 88 | AUS1096 | 1.87 | >250 | |
| 89 | AUS1097 | 1.59 | >250 | |
| 90 | AUS1098 | 1.70 | >250 | |
| 91 | AUS1099 | 1.55 | >250 | |
| 92 | AUS1100 | 1.75 | >250 | |
| 93 | AUS1101 | 5.73 | >250 | |
| 94 | AUS1102 | 17.14 | >250 | |
| 96 | AUS1105 | 1.24 | 0.88 | 0.71 |
| 97 | AUS1106 | 1.80 | 1.06 | 0.59 |
| 98 | AUS1107 | 2.63 | 1.37 | 0.52 |
| 99 | AUS1108 | 1.78 | 0.93 | 0.52 |
| 100 | AUS1109 | 1.21 | 0.85 | 0.71 |
| 101 | AUS1110 | 2.16 | 1.14 | 0.53 |
| 102 | AUS1111 | 2.66 | 1.64 | 0.62 |
| 103 | AUS1112 | 2.18 | 1.13 | 0.52 |
| 104 | AUS1113 | 1.82 | 1.13 | 0.62 |
| 105 | AUS1114 | 1.66 | 1.09 | 0.66 |
| 106 | AUS1116 | 2.40 | 1.24 | 0.52 |
| 107 | AUS1117 | 1.94 | 1.11 | 0.57 |
| 108 | AUS1118 | 1.93 | 1.31 | 0.68 |
| 109 | AUS1119 | 1.92 | 0.97 | 0.50 |
| 110 | AUS1120 | 2.89 | 0.72 | 0.25 |
| 111 | AUS1121 | 3.15 | 3.54 | 1.12 |
| 112 | AUS1122 | 3.12 | 0.54 | 0.17 |
| 113 | AUS1123 | 2.31 | 0.98 | 0.42 |
| 114 | AUS1124 | 1.02 | 0.59 | 0.58 |
| 115 | AUS1125 | 2.08 | 1.45 | 0.69 |
| 116 | AUS1126 | 1.19 | 0.82 | 0.69 |
| 117 | AUS1127 | 1.43 | 0.76 | 0.53 |
| 118 | AUS1128 | 1.46 | 0.90 | 0.62 |
| 119 | AUS1129 | 1.62 | 1.02 | 0.63 |
| 120 | AUS1130 | 1.68 | 0.85 | 0.50 |
| 121 | AUS1131 | 2.06 | 0.92 | 0.45 |
| 122 | AUS1132 | 4.88 | 2.41 | 0.49 |
| 123 | AUS1133 | 3.15 | 1.16 | 0.37 |
| 124 | AUS1134 | 1.55 | 0.89 | 0.57 |
| 125 | AUS1135 | 1.68 | 0.90 | 0.54 |
| 126 | AUS1136 | 1.54 | 0.87 | 0.57 |
| 127 | AUS1137 | 1.63 | 0.80 | 0.49 |
| 132 | AUS1143 | 1.28 | 0.81 | 0.63 |
| 133 | AUS1144 | 2.16 | 0.66 | 0.31 |
| 134 | AUS1145 | 1.95 | 0.64 | 0.33 |
| 135 | AUS1146 | 2.15 | 0.60 | 0.28 |
| 136 | AUS1147 | 2.14 | 0.59 | 0.27 |
| 137 | AUS1148 | 1.93 | 0.98 | 0.51 |
| 138 | AUS1149 | 1.80 | 0.83 | 0.46 |
| 139 | AUS1151 | 1.11 | 0.82 | 0.74 |
| 140 | AUS1152 | 2.43 | 1.43 | 0.59 |
| 141 | AUS1153 | 3.35 | 1.58 | 0.47 |
| 142 | AUS1154 | 2.67 | 3.05 | 1.14 |
| 143 | AUS1156 | 9.465422 | 2.729780304 | 0.288395 |
| 144 | AUS1157 | 9.9710755 | 2.654861737 | 0.266256 |
| 145 | AUS1158 | 23.050224 | 3.163074364 | 0.137225 |
| 146 | AUS1159 | 19.57928 | 2.076928408 | 0.106078 |
| 147 | AUS1160 | 15.571917 | 2.499341604 | 0.160503 |
| 148 | AUS1161 | 32.027347 | 2.46586735 | 0.076993 |
| 149 | AUS1162 | 9.5 | 2.7 | 0.29 |
| 150 | AUS1163 | 10.0 | 2.7 | 0.27 |
| 151 | AUS1164 | 23.1 | 3.2 | 0.14 |
| 152 | AUS1165 | 19.6 | 2.1 | 0.11 |
| 154 | AUS1168 | 3.63 | 1.11 | 0.31 |
| 155 | AUS1169 | 2.90 | 1.17 | 0.40 |
| 156 | AUS1170 | 3.98 | 1.26 | 0.32 |
| 157 | AUS1171 | 3.51 | 1.25 | 0.35 |
| 159 | AUS1174 | 0.65 | 0.93 | 1.42 |
| 160 | AUS1175 | 1.27 | 1.17 | 0.92 |
| 161 | AUS1176 | 3.05 | 1.60 | 0.52 |
| 163 | AUS1178 | 1.14 | 1.06 | 0.94 |
| 164 | AUS1179 | 1.03 | 0.64 | 0.62 |
| 165 | AUS1180 | 1.42 | 0.50 | 0.35 |
| 166 | AUS1181 | 1.48 | 0.69 | 0.46 |
| 167 | AUS1182 | 1.35 | 0.79 | 0.59 |
| 168 | AUS1183 | 2.97 | 0.60 | 0.20 |
| 169 | AUS1184 | 2.52 | 0.64 | 0.25 |
| 170 | AUS1185 | 2.52 | 0.81 | 0.32 |
| 171 | AUS1186 | 2.88 | 0.88 | 0.30 |
| 172 | AUS1187 | 1.17 | 0.65 | 0.55 |
| 173 | AUS1188 | 1.11 | 0.76 | 0.68 |
| 174 | AUS1189 | 1.51 | 0.41 | 0.27 |
| 175 | AUS1190 | 0.94 | 0.64 | 0.68 |
| 176 | AUS1191 | 1.34 | 0.91 | 0.68 |
| 177 | AUS1192 | 1.24 | 0.57 | 0.46 |
| 178 | AUS1193 | 3.30 | 0.84 | 0.26 |
| 179 | AUS1194 | 4.54 | 1.01 | 0.22 |
| 181 | AUS1198 | 2.2 | >250 | |
| 182 | AUS1199 | 6.1 | 0.3 | 0.05 |
| 183 | AUS1200 | 2.7 | >250 | |
| 184 | AUS1201 | 6.1 | 0.2 | 0.04 |
| 185 | AUS1202 | 0.7 | 0.3 | 0.44 |
| 186 | AUS1203 | 1.8 | >250 | |
| 187 | AUS1204 | 1.0 | 0.3 | 0.32 |
| 188 | AUS1205 | 4.3 | >250 | |
| 189 | AUS1206 | 2.16 | 1.71 | 0.79 |
| 190 | AUS1207 | 1.20 | 1.68 | 1.41 |
| 191 | AUS1208 | 1.29 | 2.02 | 1.56 |
| 192 | AUS1209 | 6.78 | >250 | |
| 193 | AUS1210 | 22.96 | >250 | |
| 194 | AUS1211 | >250 | >250 | |
| 195 | AUS1212 | 2.2 | 0.9 | 0.39 |
| 196 | AUS1213 | 1.6 | 0.7 | 0.41 |
| 197 | AUS1214 | 1.3 | 0.6 | 0.50 |
| 198 | AUS1215 | 1.1 | 0.4 | 0.35 |
| 199 | AUS1216 | 1.6 | 0.4 | 0.25 |
| 200 | AUS1217 | 1.8 | 0.3 | 0.16 |
| 201 | AUS1218 | 1.2 | 0.5 | 0.44 |
| 202 | AUS1219 | 0.9 | 0.3 | 0.30 |
| 203 | AUS1220 | 1.7 | 0.6 | 0.35 |
| 205 | AUS1224 | 2.7 | 1.2 | 0.46 |
| 206 | AUS1225 | 8.8 | 2.2 | 0.26 |
| 207 | AUS1226 | 19.1 | 3.0 | 0.16 |
| 208 | AUS1227 | 21.4 | 2.8 | 0.13 |
| 209 | AUS1228 | 32.4 | 4.4 | 0.14 |
| 211 | AUS1232 | | | |
| 213 | AUS1234 | 7.0 | 0.7 | 0.10 |
| 214 | AUS1235 | 3.4 | 0.6 | 0.17 |
| 215 | AUS1236 | 1.6 | 0.7 | 0.44 |
| 216 | AUS1237 | 2.4 | 0.5 | 0.21 |
| 217 | AUS1238 | 4.0 | 0.4 | 0.10 |
| 218 | AUS1241 | 0.10 | 2.08 | 20.64 |
| 219 | AUS1242 | 1.16 | 1.16 | 1.00 |
| 220 | AUS1243 | 0.79 | 1.14 | 1.44 |
| 221 | AUS1244 | 0.37 | 1.04 | 2.82 |
| 222 | AUS1245 | 1.20 | 0.97 | 0.82 |
| 223 | AUS1246 | 0.84 | 0.92 | 1.10 |
| 224 | AUS1247 | 1.18 | 0.39 | 0.33 |
| 225 | AUS1248 | 1.47 | 0.49 | 0.33 |
| 226 | AUS1249 | 0.96 | 0.75 | 0.78 |
| 227 | AUS1250 | 1.30 | 0.44 | 0.34 |
| 228 | AUS1251 | 1.23 | 0.53 | 0.43 |
| 229 | AUS1252 | 0.72 | 0.71 | 0.99 |
| 230 | AUS1253 | 0.45 | 0.59 | 1.33 |
| 231 | AUS1254 | 0.39 | 0.42 | 1.09 |
| 232 | AUS1255 | 0.50 | 0.41 | 0.83 |
| 233 | AUS1256 | 0.52 | 0.64 | 1.25 |
| 234 | AUS1257 | 0.97 | 0.93 | 0.96 |
| 235 | AUS1258 | 1.26 | 0.87 | 0.69 |
| 236 | AUS1259 | 0.76 | 0.73 | 0.95 |
| 237 | AUS1260 | 0.61 | 0.82 | 1.34 |
| 238 | AUS1261 | 1.10 | 1.11 | 1.02 |
| 239 | AUS1262 | 0.94 | 1.16 | 1.24 |
| 240 | AUS1263 | 0.50 | 1.04 | 2.09 |
| 241 | AUS1264 | 0.45 | 0.96 | 2.12 |
| 242 | AUS1266 | 2.04 | 3.37 | 1.65 |
| 243 | AUS1267 | 1.25 | 0.98 | 0.78 |
| 244 | AUS1268 | 1.81 | 1.18 | 0.65 |
| 245 | AUS1269 | 1.06 | 1.06 | 1.00 |
| 246 | AUS1270 | 1.52 | 1.31 | 0.86 |
| 247 | AUS1271 | 2.03 | 1.38 | 0.68 |
| 248 | AUS1272 | 2.78 | 1.34 | 0.48 |
| 249 | AUS1274 | 1.32 | 0.45 | 0.34 |
| 250 | AUS1275 | 0.97 | 0.34 | 0.35 |
| 251 | AUS1277 | 0.48 | 0.81 | 1.69 |
| 252 | AUS1278 | 0.29 | 1.02 | 3.48 |
| 253 | AUS1279 | 0.55 | 0.72 | 1.31 |
| 254 | AUS1280 | 0.51 | 0.67 | 1.31 |
| 255 | AUS1281 | 0.40 | 0.95 | 2.39 |
| 256 | AUS1282 | 0.29 | 0.85 | 2.92 |
| 257 | AUS1283 | 0.21 | 0.58 | 2.73 |
| 258 | AUS1284 | 0.28 | 0.92 | 3.22 |
| 259 | AUS1285 | 0.18 | 0.61 | 3.35 |
| 260 | AUS1286 | 0.38 | 0.66 | 1.75 |
| 261 | AUS1287 | 0.38 | 0.94 | 2.44 |
| 262 | AUS1288 | 0.21 | 0.98 | 4.65 |
| 263 | AUS1289 | 0.30 | 0.62 | 2.06 |
| 264 | AUS1290 | 0.25 | 0.84 | 3.41 |
| 265 | AUS1291 | 0.11 | 0.56 | 5.05 |
| 266 | AUS1292 | 0.15 | 0.58 | 3.88 |
| 267 | AUS1293 | 0.18 | 0.65 | 3.63 |
| 268 | AUS1294 | 0.12 | 0.47 | 3.74 |
| 269 | AUS1295 | 0.14 | 0.44 | 3.04 |
| 270 | AUS1296 | 0.17 | 0.58 | 3.44 |
| 271 | AUS1298 | 1.37 | 1.03 | 0.75 |
| 272 | AUS1299 | 1.88 | 1.18 | 0.62 |
| 273 | AUS1300 | 1.04 | 0.89 | 0.85 |
| 275 | AUS1302 | 1.55 | 0.88 | 0.57 |
| 276 | AUS1303 | 0.96 | 1.19 | 1.24 |
| 277 | AUS1304 | 1.02 | 1.49 | 1.46 |
| 278 | AUS1305 | 1.33 | 1.78 | 1.34 |
| 279 | AUS1306 | 1.46 | 1.12 | 0.77 |
| 280 | AUS1307 | 1.78 | 1.01 | 0.57 |
| 281 | AUS1308 | 1.23 | 1.02 | 0.83 |
| 282 | AUS1309 | 1.89 | 1.11 | 0.59 |
| 283 | AUS1310 | 1.79 | 0.98 | 0.55 |
| 284 | AUS1311 | 1.86 | 1.00 | 0.54 |
| 285 | AUS1312 | 1.34 | 1.26 | 0.94 |
| 286 | AUS1313 | 1.67 | 1.45 | 0.87 |
| 287 | AUS1314 | 2.13 | 1.18 | 0.56 |
| 288 | AUS1315 | 1.46 | 1.21 | 0.83 |
| 289 | AUS1316 | 1.91 | 1.42 | 0.74 |
| 290 | AUS1317 | 1.63 | 1.22 | 0.75 |
| 291 | AUS1318 | 1.83 | 1.19 | 0.65 |
| 292 | AUS1319 | 1.38 | 1.17 | 0.84 |
| 293 | AUS1320 | 2.08 | 1.43 | 0.69 |
| 294 | AUS1322 | 0.76 | 1.15 | 1.52 |
| 295 | AUS1323 | 0.94 | 1.32 | 1.41 |
| 296 | AUS1324 | 1.12 | 1.30 | 1.16 |
| 298 | AUS1326 | 0.14 | 0.92 | 6.60 |
| 299 | AUS1327 | 0.11 | 0.98 | 9.20 |
| 300 | AUS1328 | 0.10 | 1.00 | 9.79 |
| 301 | AUS1329 | 0.09 | 0.88 | 9.97 |
| 302 | AUS1332 | 0.12 | 3.04 | 25.45 |
| 303 | AUS1333 | 0.6 | 0.6 | 0.90 |
| 304 | AUS1334 | 0.7 | 0.6 | 0.90 |
| 305 | AUS1335 | 0.8 | 1.3 | 1.53 |
| 306 | AUS1336 | 0.8 | 1.7 | 2.05 |
| 307 | AUS1337 | 0.4 | 1.3 | 3.04 |
| 308 | AUS1338 | 0.3 | 0.8 | 2.59 |
| 309 | AUS1340 | 0.29 | 0.80 | 2.80 |
| 310 | AUS1341 | 0.26 | 0.70 | 2.64 |
| 311 | AUS1342 | 0.40 | 0.63 | 1.58 |
| 312 | AUS1343 | 0.37 | 0.85 | 2.31 |
| 313 | AUS1344 | 0.29 | 0.83 | 2.84 |
| 314 | AUS1345 | 0.24 | 0.65 | 2.63 |
| 315 | AUS1346 | 0.15 | 0.59 | 3.94 |
| 316 | AUS1347 | 0.22 | 0.44 | 2.01 |
| 317 | AUS1348 | 0.22 | 0.84 | 3.80 |
| 318 | AUS1349 | 0.14 | 0.59 | 4.34 |
| 319 | AUS1350 | 0.15 | 0.57 | 3.80 |
| 320 | AUS1351 | 0.23 | 0.66 | 2.89 |
| 321 | AUS1352 | 0.16 | 0.73 | 4.59 |
| 322 | AUS1353 | 0.15 | 0.51 | 3.48 |
| 323 | AUS1354 | 0.12 | 0.40 | 3.44 |
| 324 | AUS1355 | 0.13 | 0.60 | 4.61 |
| 325 | AUS1356 | 0.19 | 0.73 | 3.80 |
| 326 | AUS1357 | 0.14 | 0.56 | 4.02 |
| 327 | AUS1358 | 0.12 | 0.60 | 4.86 |
| 328 | AUS1359 | 0.32 | 0.71 | 2.23 |
| 329 | AUS1360 | 0.09 | 0.80 | 8.61 |
| 330 | AUS1361 | 0.13 | 0.89 | 6.85 |
| 331 | AUS1362 | 0.10 | 0.99 | 9.71 |
| 332 | AUS1365 | 0.08 | 1.94 | 24.34 |
| 333 | AUS1366 | 24.42 | >250 | |
| 334 | AUS1367 | 0.23 | 0.63 | 2.72 |
| 336 | AUS1370 | 0.74 | 1.10 | 1.49 |
| 337 | AUS1371 | 1.66 | 1.47 | 0.89 |
| 338 | AUS1372 | 0.92 | 1.44 | 1.56 |
| 339 | AUS1373 | 0.24 | 1.34 | 5.62 |
| 340 | AUS1374 | 0.74 | 1.12 | 1.51 |
| 341 | AUS1375 | 1.02 | 0.89 | 0.87 |
| 342 | AUS1376 | 0.56 | 0.93 | 1.66 |
| 343 | AUS1377 | 0.27 | 1.06 | 3.93 |
| 344 | AUS1378 | 0.48 | 0.93 | 1.93 |
| 345 | AUS1379 | 0.77 | 0.69 | 0.89 |
| 346 | AUS1382 | 0.18 | 1.06 | 5.99 |
| 347 | AUS1383 | 0.13 | 0.97 | 7.39 |
| 348 | AUS1384 | 0.15 | 1.03 | 6.86 |
| 349 | AUS1385 | 0.23 | 0.90 | 3.98 |
| 350 | AUS1387 | 1.29 | 0.82 | 0.64 |
| 351 | AUS1388 | 0.09 | 0.92 | 9.72 |
| 352 | AUS1389 | 0.13 | 0.71 | 5.31 |
| 353 | AUS1390 | 0.15 | 0.76 | 4.92 |
| 354 | AUS1391 | 0.19 | 0.76 | 3.96 |
| 355 | AUS1392 | 0.25 | 0.71 | 2.81 |
| 356 | AUS1393 | 0.27 | 0.70 | 2.59 |
| 357 | AUS1394 | 0.24 | 0.87 | 3.58 |
| 358 | AUS1395 | 0.17 | 0.97 | 5.76 |
| 359 | AUS1396 | 0.13 | 0.95 | 7.48 |
| 372 | AUS1409 | 0.04 | 1.61 | 38.05 |
| 373 | AUS1410 | 0.07 | 1.25 | 17.88 |
| 374 | AUS1411 | 0.08 | 0.83 | 10.18 |
| 375 | AUS1412 | 0.06 | 0.88 | 14.00 |
| 376 | AUS1413 | 0.07 | 0.84 | 12.46 |
| 377 | AUS1414 | 0.07 | 0.72 | 10.98 |
| 378 | AUS1415 | 0.06 | 0.75 | 13.29 |
| 385 | AUS1422 | 0.10 | 0.99 | 10.07 |
| 386 | AUS1423 | 0.07 | 0.99 | 13.47 |
| 387 | AUS1424 | 0.08 | 0.97 | 12.62 |
| 388 | AUS1425 | 0.10 | 0.95 | 9.21 |
| 389 | AUS1426 | 0.08 | 0.83 | 10.02 |
| 390 | AUS1427 | 0.07 | 0.77 | 11.07 |
| 391 | AUS1428 | 0.08 | 0.92 | 11.95 |
| 392 | AUS1429 | 0.08 | 1.22 | 15.74 |
| 393 | AUS1430 | 0.07 | 1.19 | 17.15 |
| 394 | AUS1431 | 0.05 | 1.04 | 19.01 |
| 395 | AUS1432 | 0.05 | 1.19 | 23.71 |
| 396 | AUS1433 | 0.10 | 1.09 | 10.92 |
| 397 | AUS1434 | 0.76 | 1.15 | 1.52 |
| 398 | AUS1435 | 0.18 | 1.22 | 6.70 |
| 399 | AUS1436 | 0.24 | 1.11 | 4.65 |
| 400 | AUS1437 | 0.37 | 1.33 | 3.63 |
| 401 | AUS1438 | 0.15 | 0.89 | 5.76 |
| 402 | AUS1439 | 0.34 | 1.25 | 3.72 |
| 403 | AUS1440 | 0.18 | 1.23 | 6.75 |
| 404 | AUS1441 | 0.70 | 1.31 | 1.85 |
| 406 | AUS1443 | 0.18 | 0.96 | 5.25 |
| 407 | AUS1444 | 0.22 | 0.93 | 4.17 |
| 408 | AUS1445 | 0.25 | 1.01 | 4.03 |
| 409 | AUS1446 | 0.40 | 1.46 | 3.67 |
| 410 | AUS1447 | 0.52 | 1.11 | 2.12 |
| 411 | AUS1448 | 0.67 | 1.07 | 1.59 |
| 412 | AUS1449 | 0.74 | 1.04 | 1.41 |
| 413 | AUS1450 | 0.96 | 1.26 | 1.32 |
| 414 | AUS1451 | 0.70 | 1.22 | 1.75 |
| 415 | AUS1452 | 0.54 | 1.09 | 2.00 |
| 416 | AUS1453 | 0.84 | 1.22 | 1.46 |
| 417 | AUS1454 | 0.65 | 1.00 | 1.52 |
| 418 | AUS1455 | 0.59 | 1.06 | 1.80 |
| 419 | AUS1456 | 0.56 | 1.08 | 1.91 |
| 420 | AUS1457 | 0.53 | 1.15 | 2.15 |
| 421 | AUS1458 | 0.22 | 0.95 | 4.38 |
| 422 | AUS1459 | 0.25 | 1.08 | 4.33 |
| 423 | AUS1460 | 0.23 | 1.29 | 5.71 |
| 424 | AUS1461 | 0.40 | 1.75 | 4.41 |
| 425 | AUS1462 | 0.25 | 1.77 | 7.14 |
| 426 | AUS1463 | 0.27 | 1.74 | 6.37 |
| 427 | AUS1464 | 0.38 | 2.10 | 5.45 |
| 428 | AUS1465 | 0.43 | 1.32 | 3.03 |
| 429 | AUS1466 | 0.19 | 1.20 | 6.15 |
| 430 | AUS1467 | 0.24 | 1.14 | 4.72 |
| 431 | AUS1468 | 0.25 | 1.30 | 5.29 |
| 432 | AUS1469 | 0.25 | 1.22 | 4.90 |
| 433 | AUS1470 | 0.16 | 1.16 | 7.09 |
| 434 | AUS1471 | 0.18 | 1.23 | 7.03 |
| 435 | AUS1472 | 0.19 | 1.31 | 7.01 |
| 436 | AUS1473 | 0.14 | 1.37 | 9.49 |
| 437 | AUS1474 | 0.16 | 1.42 | 9.05 |
| 438 | AUS1475 | 0.18 | 1.31 | 7.39 |
| 439 | AUS1476 | 0.10 | 1.49 | 15.50 |
| 440 | AUS1477 | 0.20 | 1.28 | 6.24 |
| 441 | AUS1478 | 0.37 | 1.33 | 3.62 |
| 442 | AUS1479 | 0.13 | 1.56 | 12.00 |
| 443 | AUS1480 | 0.14 | 1.27 | 8.90 |
| 444 | AUS1481 | 0.14 | 1.05 | 7.43 |
| 445 | AUS1482 | 0.14 | 0.90 | 6.63 |
| 446 | AUS1483 | 0.14 | 1.07 | 7.62 |
| 447 | AUS1484 | 0.47 | 1.24 | 2.65 |
| 448 | AUS1485 | 0.54 | 1.24 | 2.29 |
| 449 | AUS1486 | 0.76 | 1.46 | 1.92 |
| 450 | AUS1487 | 0.68 | 1.63 | 2.39 |
| 451 | AUS1488 | 0.20 | 1.73 | 8.62 |
| 452 | AUS1489 | 0.18 | 1.81 | 10.33 |
| 453 | AUS1490 | 0.16 | 1.77 | 11.26 |
| 455 | AUS1492 | 0.25 | 1.33 | 5.32 |
| 456 | AUS1493 | 0.38 | 1.63 | 4.25 |
| 457 | AUS1494 | 0.22 | 1.47 | 6.59 |
| 458 | AUS1495 | 0.42 | 1.45 | 3.42 |
| 466 | AUS1505 | 29.7 | 0.6 | 0.02 |
| 491 | AUS1530 | >250 | >250 | |
| 492 | AUS1531 | >250 | >250 | |
| 493 | AUS1532 | >250 | >250 | |
| 494 | AUS1533 | >250 | >250 | |
| 495 | AUS1534 | >250 | >250 | |
| 496 | AUS1535 | 35.9 | >250 | |
| 497 | AUS1536 | 1.71 | >250 | |
| 498 | AUS1537 | 1.89 | >250 | |
| 499 | AUS1538 | 3.33 | >250 | |
| 500 | AUS1539 | 5.75 | >250 | |
| 501 | AUS1540 | 3.29 | >250 | |
| 502 | AUS1541 | 1.69 | >250 | |
| 503 | AUS1542 | 1.04 | >250 | |
| 504 | AUS1543 | 3.98 | >250 | |
| 505 | AUS1544 | >250 | >250 | |
| 506 | AUS1545 | 35.96 | >250 | |
| 507 | AUS1546 | 1.65 | 0.76 | 0.46 |
| 508 | AUS1547 | >250 | >250 | |
| 509 | AUS1548 | >250 | >250 | |
| 510 | AUS1549 | >250 | >250 | |
| 511 | AUS1550 | >250 | >250 | |
| 512 | AUS1551 | 9.57 | >250 | |
| 513 | AUS1552 | 6.70 | >250 | |
| 539 | AUS1578 | 2.9 | 1.8 | 0.62 |
| 540 | AUS1579 | 2.0 | 0.5 | 0.24 |
| 541 | AUS1580 | 6.9 | 1.1 | 0.16 |
| 542 | AUS1581 | 3.2 | 0.4 | 0.11 |
| 543 | AUS1582 | 2.00 | 2.82 | 1.41 |
| 544 | AUS1583 | 2.16 | 0.82 | 0.38 |
| 545 | AUS1584 | 1.08 | 0.80 | 0.74 |
| 546 | AUS1585 | 1.19 | 0.82 | 0.69 |
| 547 | AUS1586 | 0.49 | 0.91 | 1.88 |
| 548 | AUS1587 | 0.94 | 1.78 | 1.90 |
| 549 | AUS1588 | 4.31 | 1.07 | 0.25 |
| 550 | AUS1589 | 0.99 | 1.41 | 1.42 |
| 551 | AUS1590 | 2.86 | 3.82 | 1.33 |
| 552 | AUS1591 | >250 | 5.82 | |
| 553 | AUS1592 | 5.7 | 3.1 | 0.53 |
| 554 | AUS1593 | 4.0 | 2.6 | 0.67 |
| 555 | AUS1594 | 2.6 | 1.8 | 0.68 |
| 556 | AUS1595 | 2.7 | 1.2 | 0.45 |
| 557 | AUS1596 | 2.8 | 3.5 | 1.25 |
| 558 | AUS1597 | 1.3 | 1.6 | 1.21 |
| 559 | AUS1598 | 1.9 | 1.5 | 0.77 |
| 560 | AUS1599 | 1.6 | 0.4 | 0.27 |
| 561 | AUS1600 | 1.8 | 0.8 | 0.46 |
| 562 | AUS1601 | 7.5 | 8.9 | 1.18 |
| 563 | AUS1602 | 1.2 | 0.6 | 0.55 |
| 564 | AUS1603 | 0.9 | 0.9 | 0.99 |
| 565 | AUS1604 | 1.3 | 1.1 | 0.85 |
| 566 | AUS1605 | 1.7 | 7.4 | 4.40 |
| 567 | AUS1606 | 1.1 | 1.2 | 1.04 |
| 568 | AUS1607 | 1.8 | 1.8 | 1.00 |
| 569 | AUS1608 | 2.1 | 3.0 | 1.44 |
| 570 | AUS1609 | 1.0 | 0.8 | 0.78 |
| 571 | AUS1610 | 1.5 | 1.1 | 0.75 |
| 572 | AUS1611 | 1.4 | 1.2 | 0.86 |
| 573 | AUS1612 | 1.0 | 0.5 | 0.51 |
| 574 | AUS1613 | 1.2 | 0.7 | 0.56 |
| 575 | AUS1614 | 2.9 | 1.3 | 0.46 |
| 576 | AUS1615 | 2.4 | 2.3 | 0.96 |
| 577 | AUS1616 | 1.4 | 2.6 | 1.88 |
| 578 | AUS1617 | 1.3 | 1.8 | 1.32 |
| 579 | AUS1618 | 2.3 | 0.8 | 0.37 |
| 580 | AUS1619 | 5.9 | 4.3 | 0.72 |
| 581 | AUS1620 | 6.7 | >250 | |
| 582 | AUS1621 | 11.7 | 0.8 | 0.07 |
| 583 | AUS1622 | 17.6 | 4.1 | 0.23 |
| 584 | AUS1623 | 11.9 | >250 | |
| 585 | AUS1624 | 1.5 | >250 | |
| 586 | AUS1625 | 1.1 | >250 | |
| 587 | AUS1626 | 4.2 | >250 | |
| 588 | AUS1627 | 7.1 | 2.4 | 0.33 |
| 589 | AUS1628 | 11.4 | 2.7 | 0.24 |
| 590 | AUS1629 | 20.8 | 3.9 | 0.19 |
| 591 | AUS1630 | 2.4 | >250 | |
| 614 | AUS1653 | 0.45 | | 0.00 |
| 615 | AUS1654 | 0.67 | | 0.00 |
| 616 | AUS1655 | 0.43 | | 0.00 |
| 617 | AUS1656 | 1.14 | 0.29 | 0.26 |
| 618 | AUS1657 | 0.44 | | 0.00 |
| 619 | AUS1658 | 0.78 | | 0.00 |
| 620 | AUS1659 | 0.87 | | 0.00 |
| 621 | AUS1660 | 0.63 | | 0.00 |
| 624 | AUS1663 | | | |
| 627 | AUS1666 | | | |
| 631 | AUS1670 | 1.12 | 3.19 | 2.84 |
| 639 | AUS1679 | 1.4 | >250 | |
| 641 | AUS1683 | 1.23 | 0.78 | 0.63 |
| 642 | AUS1684 | 2.74 | 2.19 | 0.80 |
| 643 | AUS1685 | 2.66 | 0.98 | 0.37 |
| 659 | AUS1705 | 5.7 | 0.3 | |
| 660 | AUS1708 | 43.0 | >250 | |
| 661 | AUS1709 | 41.4 | >250 | |
| 662 | AUS1710 | 5.95 | 0.17 | 0.03 |
| 664 | AUS1712 | | | |
| 665 | AUS1713 | 5.6 | 3.0 | 0.54 |
| 666 | AUS1714 | 8.5 | 3.7 | 0.43 |

### Example 15: Antiviral Effect of Modified Oligonucleotide Compounds in Genotype C 1.0 HBV Transgenic Mice

[0995] To evaluate the effect of modified oligonucleotide compounds on the serum levels of HBsAg in genotype C 1.0 HBV (HBV-GTC) transgenic mice, each compound was dosed once at 10, 30, or 40 mg/kg by subcutaneous injection (SC) to the mice and injection volume was 10 ml/kg. Normal saline was administered as negative control. The HBsAg levels was measured in the serum samples by Chemiluminescence immunoassay assays. The resulting data was expressed as mean and SD.

[0996] HBV transgenic mice, prepared from male C57BL/6 mice of 5-7 weeks old with 1.0-fold length of HBV C1 subtype genome, stably express HBsAg in liver. The methods and purposes of animal experiments are in accordance with the ethical standards and international practices.

[0997] The modified oligonucleotide dosing solutions were prepared by dissolving each compound in saline to make a stock solution at 10 mg/ml, which was diluted with saline again at a target concentration.

[0998] The male HBV transgenic mice were randomly divided into every group according to serum HBsAg level. Each group was dosed with one compound by subcutaneous injection at a target concentration and a dose volume of 10 ml/kg of body weight or an equal volume of normal saline as control.

[0999] Approximately 80 μl of blood sample was taken from a thigh vein on Day 0 (before dosing), 3, 7, 10, 14, 21 and/or 28 after dosing. Blood samples were placed in an incubator at 37° C. for approximately 30 minutes, and then centrifuged in a precooled (0-4° C.) centrifuge to obtain the serum samples. The obtained serum samples were stored in a −20° C. refrigerator for further HBsAg analysis.

[1000] Tables 15.1-15.7. (FIGS. 14-20) show the results of this experiment. Table 15.1 (FIG. 14) shows that a reduction in serum levels of HBsAg, relative to the reference compound AUS1233 was observed on Day 28 following treatment with a single 40 mg/kg subcutaneous dose of AUS1684, AUS1322, AUS1323 or AUS1324 on Day 0, suggesting a persistent and enhanced modified oligonucleotide antiviral activity relative to AUS1233. n=5 mice were tested for each group.

[1001] Table 15.2 (FIG. 15) shows that a reduction in serum levels of HBsAg, relative to the reference compound AUS1233 was observed on Day 28 following treatment with a single 40 mg/kg subcutaneous dose of AUS1169, AUS1171, AUS1170, AUS1168, or AUS1322 on Day 0, suggesting a persistent and enhanced modified oligonucleotide antiviral activity relative to AUS1233. n=4 mice were tested in each group.

[1002] Table 15.3 (FIG. 16) shows that a reduction in serum levels of HBsAg, relative to the reference compound AUS1233 was observed on Day 21 following treatment with a single 30 mg/kg subcutaneous dose of AUS1434, AUS1435, AUS1440, AUS1436, AUS1437, AUS1438, AUS1439, AUS1422, AUS1424, AUS1425, AUS1427, AUS1428, AUS1430, AUS1431, or AUS1432 on Day 0, suggesting a persistent and enhanced modified oligonucleotide antiviral activity relative to AUS1233. n=2 or 3 mice were tested in each group.

[1003] Table 15.4 (FIG. 17) shows that a reduction in serum levels of HBsAg, relative to the reference compound AUS1233 was observed on Day 21 following treatment with a single 30 mg/kg subcutaneous dose of AUS1463, AUS1466, AUS1476, AUS1472, AUS1489, or AUS1459 on Day 0, suggesting a persistent and enhanced modified oligonucleotide antiviral activity relative to AUS1233. n=4 mice were tested in each group.

[1004] Table 15.5 (FIG. 18) shows that a reduction in serum levels of HBsAg, relative to the reference compound AUS1233 was observed on Day 28 following treatment with a single 30 mg/kg subcutaneous dose of AUS1492, AUS1495, AUS1494, or AUS1493 on Day 0, suggesting a persistent and enhanced modified oligonucleotide antiviral activity relative to AUS1233. n=4 mice were tested in each group.

[1005] Table 15.6 (FIG. 19) shows >1.4 fold reduction in serum levels of HBsAg, relative to the reference compound AUS1233 was observed on Day 21 following treatment with a single 40 mg/kg subcutaneous dose of AUS1695 on Day 0, suggesting a persistent and enhanced modified oligonucleotide antiviral activity relative to AUS1233. n=1 or 2 mice were tested in each group.

[1006] Rows 1 and 2 of Table 15.7 (FIG. 20) shows a reduction in serum levels of HBsAg on Day 28 following treatment with a single 10 mg/kg subcutaneous dose of AUS1493 on Day 0 relative to treatment with a single 10 mg/kg subcutaneous dose of AUS1233 on Day 0, suggesting a persistent and enhanced modified oligonucleotide antiviral activity relative to AUS1233. Rows 3 and 4 of Table 15.7 (FIG. 20) shows a reduction in serum levels of HBsAg on Day 28 following treatment with a single 30 mg/kg subcutaneous dose of AUS1493 on Day 0 relative to treatment with a single 30 mg/kg subcutaneous dose of AUS1233 on Day 0, suggesting a persistent and enhanced modified oligonucleotide antiviral activity relative to AUS1233.

### Example 16: Antiviral Effect of Modified Oligonucleotide Compounds in HDI-HBV Carrier Mice

[1007] To evaluate the effect of modified oligonucleotide compounds on the serum levels of HBsAg in genotype A, B, C and D (GT-A/B/C/D) hydrodynamic-injection HBV (HDI-HBV) mice, each compound was dosed once at target dosage by subcutaneous injection (SC) to the mice and injection volume was 10 ml/kg. Normal saline was administered as negative control. The HBsAg levels were measured in the serum samples by Chemiluminescence immunoassay assays. The resulting data was expressed as mean and SD.

[1008] The HDI-HBV mouse model was constructed in male C57BL/6 mice of 5-7 weeks old by hydrodynamic-injection a target concentration GT-A/B/C/D pcDNA3.1-preS2/S plasmid (or pAAV-1.2HBV plasmid) solution containing HBV sequence, HBsAg-positive mice were used 2 to 3-week after the injection. The methods and purposes of animal experiments are in accordance with the ethical standards and international practices.

[1009] The modified oligonucleotide dosing solutions were prepared by dissolving each compound in saline to make a stock solution at 10 mg/ml, which was diluted with saline again at a target concentration.

[1010] The male GT-A/B/CD HDI-HBV mice were randomly divided into every group according to serum HBsAg level. Each group was dosed with one compound by subcutaneous injection at a target concentration and a dose volume of 10 ml/kg of body weight or an equal volume of normal saline as control.

[1011] Approximately 80 μl of blood sample was taken from a thigh vein on Day 0 (before dosing), 3, 7, 10, 14, 21, 22, and/or 28 after dosing. Blood samples were placed in an incubator at 37° C. for approximately 30 minutes, and then centrifuged in a precooled (0-4° C.) centrifuge to obtain the serum samples. The obtained serum samples were stored in a −20° C. refrigerator for further HBsAg analysis.

[1012] Tables 16.1-16.18. (FIG. 21-38) show the results of this experiment. Table 4.1 (FIG. 21) shows that a reduction in serum levels of HBsAg in GT-D HDI HBV mice, relative to the reference compound AUS1233 was observed on Day 28 following treatment with a single 60 mg/kg subcutaneous dose of AUS1684, AUS1322, AUS1323 or AUS1324 on Day 0, suggesting a persistent and enhanced modified oligonucleotide antiviral activity relative to AUS1233.

[1013] Table 16.2 (FIG. 22) shows the resulting serum levels of HBsAg in GT-D HDI HBV mice following a single 40 mg/kg subcutaneous dose of AUS1169, AUS1171, AUS1170, or AUS1168 on Day 0, suggesting a persistent and enhanced modified oligonucleotide antiviral activity relative to AUS1233.

[1014] Table 16.3 (FIG. 23) shows that a reduction in serum levels of HBsAg in GT-D HDI HBV mice, relative to the reference compound AUS1233 was observed on Day 21 following treatment with a single 60 mg/kg subcutaneous dose of AUS1173 or AUS1174 on Day 0, suggesting a persistent and enhanced modified oligonucleotide antiviral activity relative to AUS1233.

[1015] Table 16.4 (FIG. 24) shows that a reduction in serum levels of HBsAg in GT-D HDI HBV mice, relative to the reference compound AUS1233 was observed on Day 14 following treatment with a single 60 mg/kg subcutaneous dose of AUS1173, AUS1178, AUS1185, AUS1186, AUS1188, AUS1190, AUS1192, AUS1193, AUS1183, AUS1325, AUS1326, AUS1327, AUS1328, AUS1329, AUS1175, AUS1361, or AUS1362 on Day 0, suggesting a persistent and enhanced modified oligonucleotide antiviral activity relative to AUS1233.

[1016] Table 16.5 (FIG. 25) shows that a reduction in serum levels of HBsAg in GT-D HDI HBV mice, relative to the reference compound AUS1233 was observed on Day 22 following treatment with a single 60 mg/kg subcutaneous dose of AUS1322, AUS1382, AUS1383, AUS1384, or AUS1385 on Day 0, suggesting a persistent and enhanced modified oligonucleotide antiviral activity relative to AUS1233.

[1017] Table 16.6 (FIG. 26) shows the resulting serum levels of HBsAg in GT-D HDI HBV mice following a single 60 mg/kg subcutaneous dose of AUS1322, AUS1388, AUS1389, AUS1390, AUS1392, AUS1393, AUS1396, AUS1403, AUS1409, AUS1411, AUS1413, AUS1414, or AUS1415 on Day 0.

[1018] Table 16.7 (FIG. 27) shows the resulting serum levels of HBsAg in GT-D HDI HBV mice following a single 60 mg/kg subcutaneous dose of AUS1387, AUS1326, AUS1328, AUS1388, AUS1390, AUS1403, or AUS1360 on Day 0.

[1019] Table 16.8 (FIG. 28) shows that a reduction in serum levels of HBsAg in GT-D HDI HBV mice, relative to the reference compound AUS1233 was observed on Day 21 following treatment with a single 40 mg/kg subcutaneous dose of AUS1434, AUS1435, AUS1440, AUS1436, AUS1437, AUS1438, AUS1439, AUS1441, AUS1422, AUS1423, AUS1424, AUS1425, AUS1426, AUS1427, AUS1428, AUS1429, AUS1430, AUS1431, AUS1432, or AUS1433 on Day 0, suggesting a persistent and enhanced modified oligonucleotide antiviral activity relative to AUS1233.

[1020] Table 16.9 (FIG. 29) shows that a reduction in serum levels of HBsAg in GT-D HDI HBV mice, relative to the reference compound AUS1233 was observed on Day 21 following treatment with a single 40 mg/kg subcutaneous dose of AUS1444, AUS1458, AUS1459, AUS1460, AUS1461, AUS1462, AUS1463, AUS1464, AUS1465, AUS1466, AUS1467, AUS1468, AUS1469, AUS1470, AUS1471, AUS1472, AUS1473, AUS1474, AUS1476, AUS1477, AUS1478, AUS1479, AUS1480, AUS1481, AUS1482, AUS1488, AUS1489, AUS1490, AUS1443, AUS1444, or AUS1445 on Day 0, suggesting a persistent and enhanced modified oligonucleotide antiviral activity relative to AUS1233.

[1021] Table 16.10 (FIG. 30) shows that a reduction in serum levels of HBsAg in GT-D HDI HBV mice, relative to the reference compound AUS1233 was observed on Day 28 following treatment with a single 15 mg/kg subcutaneous dose of AUS1492 or AUS1493 on Day 0, suggesting a persistent and enhanced modified oligonucleotide antiviral activity relative to AUS1233.

[1022] Rows 1, 2 and 3 of Table 4.11 (FIG. 31) shows a reduction in serum levels of HBsAg in GT-A HDI HBV mice, observed on Day 28 following treatment with a single 15 mg/kg subcutaneous dose of AUS1492 or AUS1493 on Day 0, relative to a single 15 mg/kg subcutaneous dose of AUS1233 on Day 0, suggesting a persistent and enhanced modified oligonucleotide antiviral activity relative to AUS1233.

[1023] Rows 3, 4 and 5 of Table 4.11 (FIG. 31) shows a reduction in serum levels of HBsAg in GT-A HDI HBV mice, observed on Day 28 following treatment with a single 45 mg/kg subcutaneous dose of AUS1492 or AUS1493 on Day 0, relative to a single 45 mg/kg subcutaneous dose of AUS1233 on Day 0, suggesting a persistent and enhanced modified oligonucleotide antiviral activity relative to AUS1233.

[1024] Table 4.12 (FIG. 32) shows the resulting serum levels of HBsAg in GT-A HDI HBV mice following a single 15 or 45 mg/kg subcutaneous dose of AUS1441, AUS1466, AUS1472, AUS1488, or AUS1489 on Day 0.

[1025] Table 4.13 (FIG. 33) shows the resulting serum levels of HBsAg in GT-D HDI HBV mice following a single 15 or 45 mg/kg subcutaneous dose of AUS1495, AUS1494, AUS1492, or AUS1441 on Day 0.

[1026] Table 4.14 (FIG. 34) shows the resulting serum levels of HBsAg in GT-A HDI HBV mice following a single 15 or 45 mg/kg subcutaneous dose of AUS1495, AUS1494, AUS1492, AUS1482, or AUS1441 on Day 0.

[1027] Table 4.15 (FIG. 35) shows that a reduction in serum levels of HBsAg in GT-B HDI HBV mice, relative to the reference compound AUS1233 was observed on Day 21 following treatment with a single 40 mg/kg subcutaneous dose of AUS1684 on Day 0, suggesting a persistent and enhanced modified oligonucleotide antiviral activity relative to AUS1233.

[1028] Table 4.16 (FIG. 36) shows that a reduction in serum levels of HBsAg in GT-A 1.2HBV transgenic mice, relative to the reference compound AUS1233 was observed on Day 28 following treatment with a single 45 mg/kg subcutaneous dose of AUS1492 or AUS1493 on Day 0, suggesting a persistent and enhanced modified oligonucleotide antiviral activity relative to AUS1233.

[1029] Table 4.17 (FIG. 37) shows that a reduction in serum levels of HBsAg in GT-A HDI HBV mice, relative to the reference compound AUS1233 was observed on Day 21 following treatment with a single 40 mg/kg subcutaneous dose of AUS1396, AUS1422, AUS1423, AUS1424, AUS1426, AUS1427, AUS1428, AUS1429, AUS1430, AUS1431, AUS1432, or AUS1433 on Day 0, suggesting a persistent and enhanced modified oligonucleotide antiviral activity relative to AUS1233.

[1030] Table 4.18 (FIG. 38) shows that a reduction in serum levels of HBsAg in GT-A HDI HBV mice, relative to the reference compound AUS1233 was observed on Day 21 following treatment with a single 40 mg/kg subcutaneous dose of AUS1444, AUS1458, AUS1459, AUS1460, AUS1461, AUS1462, AUS1463, AUS1464, AUS1465, AUS1466, AUS1467, AUS1468, AUS1470, AUS1471, AUS1472, AUS1473, AUS1475, AUS1476, AUS1478, AUS1479, AUS1480, AUS1481, AUS1483, AUS1489, AUS1490, AUS1443, or AUS1434 on Day 0, suggesting a persistent and enhanced modified oligonucleotide antiviral activity relative to AUS1233.

### Example 17: Antiviral Effect of eASO Compounds in AAV-HBV Carrier Mice

[1031] To evaluate effect of eASO compounds on the serum levels of HBsAg in adeno-associated virus-hepatitis B virus (AAV-HBV) transfected mice, each compound was dosed once at target dosage by subcutaneous injection (SC) to the mice and injection volume was 10 ml/kg. Normal saline was administered as negative control.

[1032] The male C57BL/6 mice were aged 4-5 weeks and prepared, all the mice were injected through tail vein with 1×10¹¹ vector genome of AAV-HBV in 200 μL phosphate buffered saline per mouse on predose Day 0. Animal clinical signs were monitored twice daily during model development phase, and body weight was measured on predose Days 0, 21, and 28. Serum samples of per mouse prepared on Predose Day 21, 28 were transferred to the quantitative detections of HBsAg, HBeAg, and HBV DNA levels, HBsAg-positive mice were used 4 to 5 week after the injection. The methods and purposes of these animal experiments are in accordance with the ethical standards and international practices.

[1033] The eASO dosing solutions were prepared by dissolving each compound in saline to make a stock solution at 10 mg/ml, which was diluted with saline again at a target concentration.

[1034] Based on animal body weight and serum HBsAg, HBeAg, HBV DNA levels on predose Day 28, all transfected mice were randomized into each group. Each group was dosed with one compound by subcutaneous injection at a target concentration and a dose volume of 10 ml/kg of body weight or an equal volume of normal saline as control.

[1035] Approximately 80 μl of blood sample was taken from a thigh vein on Day 0 (before dosing), 3, 7, 10, 14, 21 and 28 after dosing. Blood samples were placed in an incubator at 37° C. for approximately 30 minutes, and then centrifuged in a precooled (0-4° C.) centrifuge to obtain the serum samples. The obtained serum samples were stored in a −20° C. refrigerator for further HBsAg, HBeAg, HBV DNA analysis. Serum HBsAg and HBeAg levels were detected using ARCHITECT i2000 (Abbott Laboratories, Lake Bluff, IL, USA) with supporting reagents. Serum HBV DNA levels were analyzed by QuantStudio™ 3 System (Applied Biosystems, Foster City, CA, USA) with detection kit (Sansure Biotech Inc., Changsha, Hunan, China).

[1036] Table 17 (FIG. 39) show the results of this experiment, a reduction in serum levels of HBsAg/HBeAg/HBV DNA in GT-D AAV HBV mice, relative to the reference compound AUS1233 was observed on Day 28 following treatment with a single 40 mg/kg subcutaneous dose of AUS1493 on Day 0, suggesting a persistent and enhanced eASO antiviral activity relative to AUS1233.

### Example 18: Toxicity Evaluation of eASO Compounds in Male C57BL/6 Mice

[1037] To evaluate effect of eASO compounds on the serum levels of alanine aminotransferase (ALT) and aspartate aminotransferase (AST) in male C57BL/6 mice, each compound was dosed triple at target dosage by subcutaneous injection (SC) on Day 0, 2, 4 and injection volume was 10 ml/kg. Normal saline was administered as negative control.

[1038] The male C57BL/6 mice were age d 6-7 weeks and prepared. The eASO dosing solutions were prepared by dissolving each compound in saline to make a stock solution at 20 mg/ml, which was diluted with saline again at a target concentration.

[1039] Based on animal body weight, all mice were randomized into each group. Each group was dosed with one compound by subcutaneous injection at a target concentration and a dose volume of 10 ml/kg of body weight or an equal volume of normal saline as control.

[1040] Approximately 80 μl of blood sample was taken from a thigh vein on Day 7, 10, 14, 21 and 28 after dosing. Blood samples were placed in an incubator at 37° C. for approximately 30 minutes, and then centrifuged in a precooled (0-4° C.) centrifuge to obtain the serum samples. The obtained serum samples were stored in a −20° C. refrigerator for further ALT and analysis. Serum ALT and AST levels were detected using colorimetric analysis kts.

[1041] Tables 18.1-18.2 (FIG. 40-41) show the results of this experiment. The tables shows that a reduction in serum levels of ALT in WT male C57BL/6 mice, relative to the reference compound AUS1233 when the mice were dosed on Day 0, 2 and 4 at 60 mg/kg by SC (n=3 mice for every group). A reduction of serum ALT levels were observed on Day 21 following treatment with AUS1434, AUS1435, AUS1440, AUS1436, AUS1437, AUS1438, AUS1439, AUS1441, AUS1178, AUS1190, AUS1188, AUS1192, AUS1422, AUS1423, AUS1424, AUS1425, AUS1426, AUS1427, AUS1428, AUS1429, AUS1430, AUS1431, AUS1432, AUS1433, AUS1360, AUS1401, AUS1361, AUS1362, AUS1443, AUS1444, AUS1445, AUS1446, AUS1447, AUS1448, AUS1449, AUS1450, AUS1452, AUS1453, AUS1454, AUS1455, AUS1456, or AUS1457, suggesting a reduced eASO toxicity relative to AUS1233 over time. These results show that the modified oligonucleotides can result in a 1.2 fold to 7.7 fold reduction in serum ALT levels on Day 21, suggesting reduced toxicity.

What is claimed is:

1. A modified oligonucleotide complementary to a portion of a HBV genome,
wherein the modified oligonucleotide comprises from 5′ to 3′:
5′ W1-G1-S1-G2-W2 3′ (Formula I)
wherein:
W1 is a 5′ wing segment;
G1 is a first gap segment;
S1 is a first separator segment;
G2 is a second gap segment;
W2 is a 3′ wing segment; and
- is an internucleoside linkage; and
wherein at least one nucleoside of the oligonucleotide is modified.

2. The modified oligonucleotide of claim 1, wherein
a. the W1 comprises 2 to 25 linked nucleosides;
b. the G1 comprises 1 to 10 linked deoxynucleosides;
c. the S1 comprises 1 to 3 linked nucleosides;
d. the G2 comprises 1 to 10 linked deoxynucleosides; and
e. the W2 comprises 2 to 35 linked nucleosides.

3. The modified oligonucleotide of claim 1, wherein the modified oligonucleotide is 18-50 linked nucleosides in length, optionally wherein the modified oligonucleotide is 20 linked nucleosides in length.

4. The modified oligonucleotide of claim 1, wherein:
a. the W1 comprises 4 or 5 linked nucleosides;
b. the G1 comprises 4, 5, or 6 linked deoxynucleosides;
c. the S1 comprises 1 linked nucleoside;
d. the G2 comprises 4, 5, 6, or 7 linked deoxynucleosides; and
e. the W2 comprises 3, 4, 5, or 6 linked nucleosides.

5. The modified oligonucleotide of claim 1, wherein the modified oligonucleotide is 20 linked nucleosides in length and wherein the S1 is at position 10 of the modified oligonucleotide.

6. The modified oligonucleotide of claim 1, wherein:
a. the W1 comprises 4 linked nucleosides;
b. the G1 comprises 5 linked deoxynucleosides;
c. the S1 comprises 1 linked nucleoside;
d. the G2 comprises 5 linked deoxynucleosides; and
e. the W2 comprises 5 linked nucleosides.

7. The modified oligonucleotide of claim 1, wherein the length of the G1-S1-G2 is between 8 and 12 linked nucleosides in length.

8. The modified oligonucleotide of claim 1, wherein the G1 and/or the G2 comprise a modified nucleoside, and optionally comprise:
a. a nucleoside comprising a modification to a 2′-deoxynucleoside; or
b. a nucleoside comprising a 2′-deoxy 5-methylcytidine sugar modification.

9. The modified oligonucleotide of claim 1, wherein the S1 comprises a modified nucleoside, and optionally comprises:
a. a nucleoside comprising a 2′-O-methoxyethyl sugar modification;
b. a nucleoside comprising a 5-methylcytidine;
c. a nucleoside comprising a 2′-O-methyl sugar modification;
d. a nucleoside comprising a 2′-OH sugar modification;
e. a nucleoside comprising a 2′-fluoro sugar modification;
f. a nucleoside comprising a 2′-fluoro-arabinonucleic acid (2′-fluoro-ANA) sugar modification;
g. a glycol nucleic acid (GNA); or
h. a locked nucleic acid (LNA).

10. The modified oligonucleotide of claim 1, wherein at least one internucleoside linkage is a phosphodiester linkage or a modified internucleoside linkage, optionally wherein the modified internucleoside linkage is a phosphorothioate internucleoside linkage.

11. The modified oligonucleotide of claim 1, wherein the HBV genome is the genome of HBV GT-A, GT-B, GT-C, GT-D, GT-E, GT-F, GT-G, or GT-H.

12. The modified oligonucleotide of claim 1, wherein:
a. the modified oligonucleotide is at least 60% complementary to a portion of the polynucleotide sequence of any one of SEQ ID NOs: 3, and 667-674; or
b. the modified oligonucleotide is complementary to the polynucleotide sequence of any one of SEQ ID NOs: 1, 4, and 675-838.

13. The modified oligonucleotide of claim 1, wherein the modified oligonucleotide comprises a nucleobase sequence corresponding to SEQ ID NO: 2, or a nucleobase sequence having at least 90% sequence identity to SEQ ID NO: 2.

14. The modified oligonucleotide of claim 1, wherein the W1 comprises a modified nucleoside, and optionally comprises:
a. a nucleoside comprising a 2′-deoxy sugar modification, optionally wherein the 2′-deoxy sugar modification is at positions 2 and/or 5 of a sequence corresponding to SEQ ID NO: 2;
b. a nucleoside comprising a 2′-O-methoxyethyl sugar modification, optionally wherein the 2′-O-methoxyethyl sugar modification is at position 1, 2, 3, 4 and/or 5 of a sequence corresponding to SEQ ID NO: 2;
c. a 2′-O-methoxyethyl 5-methylcytidine at position 2 of a sequence corresponding to SEQ ID NO: 2;
d. a nucleoside comprising a 2′-O-methyl sugar modification; optionally wherein the 2′-O-methyl sugar modification is at positions 1, 2, 3, 4 and/or 5 of a sequence corresponding to SEQ ID NO: 2;
e. a 2′-O-methyl 5-methylcytidine at position 2 of a sequence corresponding to SEQ ID NO: 2; optionally wherein W1 comprises a nucleoside comprising a 2′-fluoro sugar modification;
f. a nucleoside comprising a 2′-fluoro-ANA modification;
g. a GNA, optionally wherein the GNA is at position 2 of a sequence corresponding to SEQ ID NO: 2; or
h. a LNA, optionally wherein the LNA is at positions 1 and/or 3 of a sequence corresponding to SEQ ID NO: 2.

15. The modified oligonucleotide of claim 1, wherein the W2 comprises a modified nucleoside, and optionally comprises:
a. a nucleoside comprising a 2′-deoxy sugar modification, optionally wherein the 2′-deoxy sugar modification is at positions 15 and/or 16 of a sequence corresponding to SEQ ID NO: 2;
b. a nucleoside comprising a 2′-O-methoxyethyl sugar modification, optionally wherein the 2′-O-methoxyethyl sugar modification is at positions 15, 16, 17, 18, 19 and/or 20 of a sequence corresponding to SEQ ID NO: 2;
c. a 2′-O-methoxyethyl 5-methylcytidine at position 20 of a sequence corresponding to SEQ ID NO: 2;
d. a nucleoside comprising a 2′-O-methyl sugar modification, optionally wherein the 2′-O-methyl sugar modification is at positions 15, 16, 17, 18, 19 and/or 20 of a sequence corresponding to SEQ ID NO: 2;
e. a 2′-O-methyl 5-methylcytidine at position 20 of a sequence corresponding to SEQ ID NO: 2;
f. a nucleoside comprising a 2′-fluoro sugar modification;
g. a nucleoside comprising a 2′-fluoro-ANA modification;
h. a GNA; or
i. a LNA, optionally wherein the LNA is at positions 16, 17, 18, 19 and/or 20 of a sequence corresponding to SEQ ID NO: 2.

16. The modified oligonucleotide of claim 1, wherein:
a. the modified oligonucleotide comprises a nucleobase sequence corresponding to SEQ ID NO: 2 or a nucleobase sequence having at least 90% sequence identity to SEQ ID NO: 2; and
b. the modified oligonucleotide comprises from 5′ to 3′:
5′ W1-G1-S1-G2-W2 3′ (Formula I)
wherein:
W1 is a 5′ wing segment;
G1 is a first gap segment;
S1 is a first separator segment;
G2 is a second gap segment;
W2 is a 3′ wing segment; and
- is an internucleoside linkage; wherein
i. the G1 comprises 5 linked deoxynucleosides;
ii. the S1 comprises a 2′-O-methoxyethyl sugar modification at position 10 of the modified oligonucleotide; and
iii. the G2 comprises 5 linked deoxynucleosides.

17. The modified oligonucleotide of claim 16, wherein:
a. the W1 comprises a 2′-O-methoxyethyl sugar modification at positions 1, 3, and 4 of the modified oligonucleotide, and a 2′-O-methoxyethyl 5-methylcytidine at position 2 of the modified oligonucleotide; and
b. the W2 comprises a 2′-O-methoxyethyl sugar modification at positions 16 and 18 of the modified oligonucleotide, and a LNA at positions 17, 19, and 20 of the modified oligonucleotide.

18. The modified oligonucleotide of claim 16, wherein the modified oligonucleotide comprises the sequence of SEQ ID NOs: 392, 394, 426-427, 429-431, 433-434, 439-440, 457-458, and 456, or a sequence having at least 70% sequence identity thereto.

19. A pharmaceutical composition comprising the modified oligonucleotide of claim 1 and at least one pharmaceutically acceptable carrier or diluent.

20. A formulation comprising about 100 mg/mL, about 150 mg/mL, about 200 mg/mL, or about 250 mg/mL of the modified oligonucleotide of claim 1.

21. A method of preventing, treating, ameliorating or slowing the progression of a HBV-related disease, disorder or condition comprising administering to a subject the modified oligonucleotide of claim 1.

22. The method of claim 21, wherein an amount of an HBV mRNA, HBV DNA, HBV protein, or HBV antigen in the subject is reduced.

23. The method of claim 22, wherein the HBV antigen is HBsAg or HBeAg.

24. The method of claim 21, wherein liver toxicity and/or persistence in the subject is reduced.

25. The method of claim 21, wherein the subject is administered with at least one, at least 2, at least 3, at least 4 or at least 5 doses of the modified oligonucleotide.

26. The method of claim 25, wherein the dose is about 30 mg to about 600 mg.

27. The method of claim 21, wherein the administering to a subject is parenteral, subcutaneous, transdermal, intraocular, intramuscular, or intravenous.

28. The method of claim 21, wherein the subject is human.

29. A modified oligonucleotide complementary to a portion of a HBV genome,
wherein the modified oligonucleotide comprises from 5′ to 3′:
a. 5′ W1-G1-S1-G2-S2-G3-W2 3′ (Formula II)
wherein:
W1 is a 5′ wing segment;
G1 is a first gap segment;
S1 is a first separator segment;
G2 is a second gap segment;
S2 is a second separator segment;
G3 is a third gap segment;
W2 is a 3′ wing segment; and
- is an internucleoside linkage; and
wherein at least one nucleoside of the oligonucleotide is modified;
b. 5′ W1-G1-S1-G2-S2-G3-S3-G4-W2 3′ (Formula III)
wherein:
W1 is a 5′ wing segment;
G1 is a first gap segment;
S1 is a first separator segment;
G2 is a second gap segment;
S2 is a second separator segment;
G3 is a third gap segment;
S3 is a third separator segment;
G4 is a fourth gap segment;
W2 is a 3′ wing segment; and
- is an internucleoside linkage; and
wherein at least one nucleoside of the oligonucleotide is modified;
c. 5′ W1-G1-S1-G2-S2-G3-S3-G4-S4-G5-W2 3′ (Formula IV)
wherein:
W1 is a 5′ wing segment;
G1 is a first gap segment;
S1 is a first separator segment;
G2 is a second gap segment;
S2 is a second separator segment;
G3 is a third gap segment;
S3 is a third separator segment;
G4 is a fourth gap segment;
S4 is a fourth separator segment;
G5 is a fifth gap segment;
W2 is a 3′ wing segment; and
- is an internucleoside linkage; and
wherein at least one nucleoside of the oligonucleotide is modified;
d. 5′ W1-G1-S1-G2-S2-G3-S3-G4-S4-G5-S5-G6-W2 3′ (Formula V)
wherein:
W1 is a 5′ wing segment;
G1 is a first gap segment;
S1 is a first separator segment;
G2 is a second gap segment;
S2 is a second separator segment;
G3 is a third gap segment;
S3 is a third separator segment;
G4 is a fourth gap segment;
S4 is a fourth separator segment;
G5 is a fifth gap segment;
S5 is a fifth separator segment;
G6 is a sixth gap segment;
W2 is a 3′ wing segment; and
- is an internucleoside linkage; and
wherein at least one nucleoside of the oligonucleotide is modified; or
e. 5′ W1-G1-S1-G2-S2-G3-S3-G4-S4-G5-S5-G6-S6-G7-W2 3′ (Formula VI)
wherein:
W1 is a 5′ wing segment;
G1 is a first gap segment;
S1 is a first separator segment;
G2 is a second gap segment;
S2 is a second separator segment;
G3 is a third gap segment;
S3 is a third separator segment;
G4 is a fourth gap segment;
S4 is a fourth separator segment;
G5 is a fifth gap segment;
S5 is a fifth separator segment;
S6 is a sixth separator segment;
G7 is a seventh gap segment;
W2 is a 3′ wing segment; and
- is an internucleoside linkage; and
wherein at least one nucleoside of the oligonucleotide is modified.

30. A modified oligonucleotide comprising:
a. any one of SEQ ID NOS: 11-666, or a modified oligonucleotide comprising at least 1, 2, 3, 4, or 5 further modifications thereto; or
b. any one of SEQ ID NOS: 11-666, or a modified oligonucleotide having at least 70% sequence identity thereto.

The application's sequence listing, which the Patent Office published only in electronic form, follows.

SEQUENCE LISTING (838 sequences)

SEQ ID NO: 1 - DNA, 19 bp, Hepatitis B virus
  source 1..19: mol_type = genomic DNA
cttggtcatgggccatcag

SEQ ID NO: 2 - skipped

SEQ ID NO: 3 - DNA, 3182 bp, Hepatitis B virus
  source 1..3182: mol_type = genomic DNA
aattccacaacctttcaccaaactctgcaagatcccagagtgagaggcctgtatttccctgctggtggctccagttcaggagcagtaaaccctgttccgactactgcctctcccttatcgtcaatcttctcgaggattggggaccctgcgctgaacatggagaacatcacatcaggattcctaggaccccttctcgtgttacaggcggggtttttcttgttgacaagaatcctcacaataccgcagagtctagactcgtggtggacttctctcaattttctagggggaactaccgtgtgtcttggccaaaattcgcagtccccaacctccaatcactcaccaacctcctgtcctccaacttgtcctggttatcgctggatgtgtctgcggcgttttatcatcttcctcttcatcctgctgctatgcctcatcttcttgttggttcttctggactatcaaggtatgttgcccgtttgtcctctaattccaggatcctcaaccaccagcacgggaccatgccgaacctgcatgactactgctcaaggaacctctatgtatccctcctgttgctgtaccaaaccttcggacggaaattgcacctgtattcccatcccatcatcctgggctttcggaaaattcctatgggagtgggcctcagcccgtttctcctggctcagtttactagtgccatttgttcagtggttcgtagggctttcccccactgtttggctttcagttatatggatgatgtggtattgggggccaagtctgtacagcatcttgagtccctttttaccgctgttaccaattttcttttgtctttgggtatacatttaaaccctaacaaaacaaagagatggggttactctctgaattttatgggttatgtcattggaagttatgggtccttgccacaagaacacatcatacaaaaaatcaaagaatgttttagaaaacttcctattaacaggcctattgattggaaagtatgtcaacgaattgtgggtcttttgggttttgctgccccatttacacaatgtggttatcctgcgttaatgcccttgtatgcatgtattcaatctaagcaggctttcactttctcgccaacttacaaggcctttctgtgtaaacaatacctgaacctttaccccgttgcccggcaacggccaggtctgtgccaagtgtttgctgacgcaacccccactggctggggcttggtcatgggccatcagcgcgtgcgtggaaccttttcggctcctctgccgatccatactgcggaactcctagccgcttgttttgctcgcagcaggtctggagcaaacattatcgggactgataactctgttgtcctctcccgcaaatatacatcgtatccatggctgctaggctgtgctgccaactggatcctgcgcgggacgtcctttgtttacgtcccgtcggcgctgaatcctgcggacgacccttctcggggtcgcttgggactctctcgtccccttctccgtctgccgttccgaccgaccacggggcgcacctctctttacgcggactccccgtctgtgccttctcatctgccggaccgtgtgcacttcgcttcacctctgcacgtcgcatggagaccaccgtgaacgcccaccgaatgttgcccaaggtcttacataagaggactcttggactctctgcaatgtcaacgaccgaccttgaggcatacttcaaagactgtttgtttaaagactgggaggagttgggggaggagattagattaaaggtctttgtactaggaggctgtaggcataaattggtctgcgcaccagcaccatgcaactttttcacctctgcctaatcatctcttgttcatgtcctactgttcaagcctccaagctgtgccttgggtggctttggggcatggacatcgacccttataaagaatttggagctactgtggagttactctcgtttttgccttctgacttctttccttcagtacgagatcttctagataccgcctcagctctgtatcgggaagccttagagtctcctgagcattgttcacctcaccatactgcactcaggcaagcaattctttgctggggggaactaatgactctagctacctgggtgggtgttaatttggaagatccagcatctagagacctagtagtcagttatgtcaacactaatatgggcctaaagttcaggcaactcttgtggtttcacatttcttgtctcacttttggaagagaaaccgttatagagtatttggtgtctttcggagtgtggattcgcactcctccagcttatagaccaccaaatgcccctatcctatcaacacttccggaaactactgttgttagacgacgaggcaggtcccctagaagaagaactccctcgcctcgcagacgaaggtctcaatcgccgcgtcgcagaagatctcaatctcgggaacctcaatgttagtattccttggactcataaggtggggaactttactggtctttattcttctactgtacctgtctttaatcctcattggaaaacaccatcttttcctaatatacatttacaccaagacattatcaaaaaatgtgaacagtttgtaggcccacttacagttaatgagaaaagaagattgcaattgattatgcctgctaggttttatccaaaggttaccaaatatttaccattggataagggtattaaaccttattatccagaacatctagttaatcattacttccaaactagacactatttacacactctatggaaggcgggtatattatataagagagaaacaacacatagcgcctcattttgtgggtcaccatattcttgggaacaagatctacagcatggggcagaatctttccaccagcaatcctctgggattctttcccgaccaccagttggatccagccttcagagcaaacacagcaaatccagattgggacttcaatcccaacaaggacacctggccagacgccaacaaggtaggagctggagcattcgggctgggtttcaccccaccgcacggaggccttttggggtggagccctcaggctcagggcatactacaaactttgccagcaaatccgcctcctgcctccaccaatcgccagacaggaaggcagcctaccccgctgtctccacctttgagaaacactcatcctcaggccatgcagtgg

SEQ ID NO: 4 - DNA, 20 bp, Hepatitis B virus
  source 1..20: mol_type = genomic DNA
gcacttcgcttcacctctgc

SEQ ID NO: 5-9 - skipped (5 entries)

SEQ ID NO: 10 - DNA, 20 bp, synthetic construct
  source 1..20: mol_type = other DNA
  modified_base 1: mod_base = OTHER; note = 2'-O-methoxyethyl guanosine
  modified_base 2: mod_base = OTHER; note = 2'-O-methoxyethyl 5-methylcytidine
  modified_base 3: mod_base = OTHER; note = 2'-O-methoxyethyl adenosine
  modified_base 4: mod_base = OTHER; note = 2'-O-methoxyethyl guanosine
  modified_base 5: mod_base = OTHER; note = 2'-O-methoxyethyl adenosine
  modified_base 13: mod_base = OTHER; note = 2'-deoxy 5-methylcytidine
  modified_base 16: mod_base = OTHER; note = 2'-O-methoxyethyl adenosine
  modified_base 17: mod_base = OTHER; note = 2'-O-methoxyethyl guanosine
  modified_base 18: mod_base = OTHER; note = 2'-O-methoxyethyl thymidine
  modified_base 19: mod_base = OTHER; note = 2'-O-methoxyethyl guanosine
  modified_base 20: mod_base = OTHER; note = 2'-O-methoxyethyl 5-methylcytidine
  misc_feature 1..5: note = RNA
  misc_feature 6..15: note = DNA
  misc_feature 16..20: note = RNA
gcagaggtgaagcgaagtgc

SEQ ID NO: 11 - DNA, 40 bp, synthetic construct
  source 1..40: mol_type = other DNA
  modified_base 1: mod_base = OTHER; note = 2'-deoxy cytidine
  modified_base 5: mod_base = OTHER; note = 2'-deoxy cytidine
  modified_base 8: mod_base = OTHER; note = 2'-deoxy cytidine
  modified_base 12: mod_base = OTHER; note = 2'-deoxy cytidine
  modified_base 23: mod_base = OTHER; note = 2'-deoxy cytidine
  modified_base 30: mod_base = OTHER; note = 2'-deoxy cytidine
  modified_base 31: mod_base = OTHER; note = 2'-deoxy cytidine
  modified_base 34: mod_base = OTHER; note = 2'-deoxy cytidine
  modified_base 37: mod_base = OTHER; note = 2'-deoxy cytidine
caaacaacaagcagaggtgaagcgaagtgccaacaacaaa

SEQ ID NO: 12 - DNA, 40 bp, synthetic construct
  source 1..40: mol_type = other DNA
  modified_base 2: mod_base = OTHER; note = 2'-deoxy 5-methylcytidine
  modified_base 13: mod_base = OTHER; note = 2'-deoxy 5-methylcytidine
  modified_base 20: mod_base = OTHER; note = 2'-deoxy 5-methylcytidine
  modified_base 24: mod_base = OTHER; note = 2'-deoxy 5-methylcytidine
  modified_base 27: mod_base = OTHER; note = 2'-deoxy 5-methylcytidine
  modified_base 31: mod_base = OTHER; note = 2'-deoxy 5-methylcytidine
  modified_base 34: mod_base = OTHER; note = 2'-deoxy 5-methylcytidine
  modified_base 38: mod_base = OTHER; note = 2'-deoxy 5-methylcytidine
gcagaggtgaagcgaagtgcaaacaacaaacaacaaacaa

SEQ ID NO: 13 - RNA, 20 nt, synthetic construct
  source 1..20: mol_type = other RNA
  modified_base 1: mod_base = OTHER; note = 2'-O-methoxyethyl guanosine
  modified_base 2: mod_base = OTHER; note = 2'-O-methoxyethyl 5-methylcytidine
  modified_base 3: mod_base = OTHER; note = 2'-O-methoxyethyl adenosine
  modified_base 4: mod_base = OTHER; note = 2'-O-methoxyethyl guanosine
  modified_base 5: mod_base = OTHER; note = 2'-O-methoxyethyl adenosine
  modified_base 6: mod_base = OTHER; note = 2'-O-methoxyethyl guanosine
  modified_base 7: mod_base = OTHER; note = 2'-O-methoxyethyl guanosine
  modified_base 8: mod_base = OTHER; note = 2'-O-methoxyethyl thymidine
  modified_base 9: mod_base = OTHER; note = 2'-O-methoxyethyl guanosine
  modified_base 10: mod_base = OTHER; note = 2'-O-methoxyethyl adenosine
  modified_base 11: mod_base = OTHER; note = 2'-O-methoxyethyl adenosine
  modified_base 12: mod_base = OTHER; note = 2'-O-methoxyethyl guanosine
  modified_base 13: mod_base = OTHER; note = 2'-O-methoxyethyl 5-methylcytidine
  modified_base 14: mod_base = OTHER; note = 2'-O-methoxyethyl guanosine
  modified_base 15: mod_base = OTHER; note = 2'-O-methoxyethyl adenosine
  modified_base 16: mod_base = OTHER; note = 2'-O-methoxyethyl adenosine
  modified_base 17: mod_base = OTHER; note = 2'-O-methoxyethyl guanosine
  modified_base 18: mod_base = OTHER; note = 2'-O-methoxyethyl thymidine
  modified_base 19: mod_base = OTHER; note = 2'-O-methoxyethyl guanosine
  modified_base 20: mod_base = OTHER; note = 2'-O-methoxyethyl 5-methylcytidine
gcagaggtgaagcgaagtgc

SEQ ID NO: 14 - DNA, 20 bp, synthetic construct
  source 1..20: mol_type = other DNA
  modified_base 1: mod_base = OTHER; note = 2'-O-methoxyethyl guanosine
  modified_base 2: mod_base = OTHER; note = 2'-O-methoxyethyl 5-methylcytidine
  modified_base 3: mod_base = OTHER; note = 2'-O-methoxyethyl adenosine
  modified_base 4: mod_base = OTHER; note = 2'-O-methoxyethyl guanosine
  modified_base 5: mod_base = OTHER; note = 2'-O-methoxyethyl adenosine
  modified_base 6: mod_base = OTHER; note = 2'-O-methoxyethyl guanosine
  modified_base 7: mod_base = OTHER; note = 2'-O-methoxyethyl guanosine
  modified_base 8: mod_base = OTHER; note = 2'-O-methoxyethyl thymidine
  modified_base 9: mod_base = OTHER; note = 2'-O-methoxyethyl guanosine
  modified_base 12: mod_base = OTHER; note = 2'-O-methoxyethyl guanosine
  modified_base 13: mod_base = OTHER; note = 2'-O-methoxyethyl 5-methylcytidine
  modified_base 14: mod_base = OTHER; note = 2'-O-methoxyethyl guanosine
  modified_base 15: mod_base = OTHER; note = 2'-O-methoxyethyl adenosine
  modified_base 16: mod_base = OTHER; note = 2'-O-methoxyethyl adenosine
  modified_base 17: mod_base = OTHER; note = 2'-O-methoxyethyl guanosine
  modified_base 18: mod_base = OTHER; note = 2'-O-methoxyethyl thymidine
  modified_base 19: mod_base = OTHER; note = 2'-O-methoxyethyl guanosine
  modified_base 20: mod_base = OTHER; note = 2'-O-methoxyethyl 5-methylcytidine
  misc_feature 1..9: note = RNA
  misc_feature 10..11: note = DNA
  misc_feature 12..20: note = RNA
gcagaggtgaagcgaagtgc

SEQ ID NO: 15 - DNA, 20 bp, synthetic construct
  source 1..20: mol_type = other DNA
  modified_base 1: mod_base = OTHER; note = 2'-O-methoxyethyl guanosine
  modified_base 2: mod_base = OTHER; note = 2'-O-methoxyethyl 5-methylcytidine
  modified_base 3: mod_base = OTHER; note = 2'-O-methoxyethyl adenosine
  modified_base 4: mod_base = OTHER; note = 2'-O-methoxyethyl guanosine
  modified_base 5: mod_base = OTHER; note = 2'-O-methoxyethyl adenosine
  modified_base 6: mod_base = OTHER; note = 2'-O-methoxyethyl guanosine
  modified_base 7: mod_base = OTHER; note = 2'-O-methoxyethyl guanosine
  modified_base 8: mod_base = OTHER; note = 2'-O-methoxyethyl thymidine
  modified_base 13: mod_base = OTHER; note = 2'-O-methoxyethyl 5-methylcytidine
  modified_base 14: mod_base = OTHER; note = 2'-O-methoxyethyl guanosine
  modified_base 15: mod_base = OTHER; note = 2'-O-methoxyethyl adenosine
  modified_base 16: mod_base = OTHER; note = 2'-O-methoxyethyl adenosine
  modified_base 17: mod_base = OTHER; note = 2'-O-methoxyethyl guanosine
  modified_base 18: mod_base = OTHER; note = 2'-O-methoxyethyl thymidine
  modified_base 19: mod_base = OTHER; note = 2'-O-methoxyethyl guanosine
  modified_base 20: mod_base = OTHER; note = 2'-O-methoxyethyl 5-methylcytidine
  misc_feature 1..8: note = RNA
  misc_feature 9..12: note = DNA
  misc_feature 13..20: note = RNA
gcagaggtgaagcgaagtgc

SEQ ID NO: 16 - DNA, 20 bp, synthetic construct
  source 1..20: mol_type = other DNA
  modified_base 1: mod_base = OTHER; note = 2'-O-methoxyethyl guanosine
  modified_base 2: mod_base = OTHER; note = 2'-O-methoxyethyl 5-methylcytidine
  modified_base 3: mod_base = OTHER; note = 2'-O-methoxyethyl adenosine
  modified_base 4: mod_base = OTHER; note = 2'-O-methoxyethyl guanosine
  modified_base 5: mod_base = OTHER; note = 2'-O-methoxyethyl adenosine
  modified_base 6: mod_base = OTHER; note = 2'-O-methoxyethyl guanosine
  modified_base 13: mod_base = OTHER; note = 2'-deoxy 5-methylcytidine
  modified_base 15: mod_base = OTHER; note = 2'-O-methoxyethyl adenosine
  modified_base 16: mod_base = OTHER; note = 2'-O-methoxyethyl adenosine
  modified_base 17: mod_base = OTHER; note = 2'-O-methoxyethyl guanosine
  modified_base 18: mod_base = OTHER; note = 2'-O-methoxyethyl thymidine
  modified_base 19: mod_base = OTHER; note = 2'-O-methoxyethyl guanosine
  modified_base 20: mod_base = OTHER; note = 2'-O-methoxyethyl 5-methylcytidine
  misc_feature 1..6: note = RNA
  misc_feature 7..14: note = DNA
  misc_feature 15..20: note = RNA
gcagaggtgaagcgaagtgc

SEQ ID NO: 17 - DNA, 40 bp, synthetic construct; identical to SEQ ID NO: 11
  source 1..40: mol_type = other DNA
  modified_base 1: mod_base = OTHER; note = 2'-O-methyl 5-methylcytidine
  modified_base 2: mod_base = OTHER; note = 2'-O-methyl adenosine
  modified_base 3: mod_base = OTHER; note = 2'-O-methyl adenosine
  modified_base 4: mod_base = OTHER; note = 2'-O-methyl adenosine
  modified_base 5: mod_base = OTHER; note = 2'-O-methyl 5-methylcytidine
  modified_base 6: mod_base = OTHER; note = 2'-O-methyl adenosine
  modified_base 7: mod_base = OTHER; note = 2'-O-methyl adenosine
  modified_base 8: mod_base = OTHER; note = 2'-O-methyl 5-methylcytidine
  modified_base 9: mod_base = OTHER; note = 2'-O-methyl adenosine
  modified_base 10: mod_base = OTHER; note = 2'-O-methyl adenosine
  modified_base 11: mod_base = OTHER; note = 2'-O-methyl guanosine
  modified_base 12: mod_base = OTHER; note = 2'-O-methyl 5-methylcytidine
  modified_base 13: mod_base = OTHER; note = 2'-O-methyl adenosine
  modified_base 14: mod_base = OTHER; note = 2'-O-methyl guanosine
  modified_base 15: mod_base = OTHER; note = 2'-O-methyl adenosine
  modified_base 23: mod_base = OTHER; note = 2'-deoxy cytidine
  modified_base 26: mod_base = OTHER; note = 2'-O-methyl adenosine
  modified_base 27: mod_base = OTHER; note = 2'-O-methyl guanosine
  modified_base 28: mod_base = OTHER; note = 2'-O-methyl thymidine
  modified_base 29: mod_base = OTHER; note = 2'-O-methyl guanosine
  modified_base 30: mod_base = OTHER; note = 2'-O-methyl 5-methylcytidine
  modified_base 31: mod_base = OTHER; note = 2'-O-methyl 5-methylcytidine
  modified_base 32: mod_base = OTHER; note = 2'-O-methyl adenosine
  modified_base 33: mod_base = OTHER; note = 2'-O-methyl adenosine
  modified_base 34: mod_base = OTHER; note = 2'-O-methyl 5-methylcytidine
  modified_base 35: mod_base = OTHER; note = 2'-O-methyl adenosine
  modified_base 36: mod_base = OTHER; note = 2'-O-methyl adenosine
  modified_base 37: mod_base = OTHER; note = 2'-O-methyl 5-methylcytidine
  modified_base 38: mod_base = OTHER; note = 2'-O-methyl adenosine
  modified_base 39: mod_base = OTHER; note = 2'-O-methyl adenosine
  modified_base 40: mod_base = OTHER; note = 2'-O-methyl adenosine
  misc_feature 1..15: note = RNA
  misc_feature 16..25: note = DNA
  misc_feature 26..40: note = RNA

SEQ ID NO: 18 - RNA, 20 nt, synthetic construct
  source 1..20: mol_type = other RNA
  modified_base 1: mod_base = OTHER; note = 2'-O-methyl guanosine
  modified_base 2: mod_base = OTHER; note = 2'-O-methyl 5-methylcytidine
  modified_base 3: mod_base = OTHER; note = 2'-O-methyl adenosine
  modified_base 4: mod_base = OTHER; note = 2'-O-methyl guanosine
  modified_base 5: mod_base = OTHER; note = 2'-O-methyl adenosine
  modified_base 6: mod_base = OTHER; note = 2'-O-methyl guanosine
  modified_base 7: mod_base = OTHER; note = 2'-O-methyl guanosine
  modified_base 8: mod_base = OTHER; note = 2'-O-methyl thymidine
  modified_base 9: mod_base = OTHER; note = 2'-O-methyl guanosine
  modified_base 10: mod_base = OTHER; note = 2'-O-methyl adenosine
  modified_base 11: mod_base = OTHER; note = 2'-O-methyl adenosine
  modified_base 12: mod_base = OTHER; note = 2'-O-methyl guanosine
  modified_base 13: mod_base = OTHER; note = 2'-O-methyl 5-methylcytidine
  modified_base 14: mod_base = OTHER; note = 2'-O-methyl guanosine
  modified_base 15: mod_base = OTHER; note = 2'-O-methyl adenosine
  modified_base 16: mod_base = OTHER; note = 2'-O-methyl adenosine
  modified_base 17: mod_base = OTHER; note = 2'-O-methyl guanosine
  modified_base 18: mod_base = OTHER; note = 2'-O-methyl thymidine
  modified_base 19: mod_base = OTHER; note = 2'-O-methyl guanosine
  modified_base 20: mod_base = OTHER; note = 2'-O-methyl 5-methylcytidine
gcagaggtgaagcgaagtgc

SEQ ID NO: 19 - RNA, 20 nt, synthetic construct
  source 1..20: mol_type = other RNA
  modified_base 1: mod_base = OTHER; note = 2'-O-methoxyethyl guanosine
  modified_base 2: mod_base = OTHER; note = 2'-O-methoxyethyl 5-methylcytidine
  modified_base 3: mod_base = OTHER; note = 2'-O-methoxyethyl adenosine
  modified_base 4: mod_base = OTHER; note = 2'-O-methoxyethyl guanosine
  modified_base 5: mod_base = OTHER; note = 2'-O-methoxyethyl adenosine
  modified_base 6: mod_base = OTHER; note = 2'-O-methoxyethyl guanosine
  modified_base 7: mod_base = OTHER; note = 2'-O-methoxyethyl guanosine
  modified_base 8: mod_base = OTHER; note = 2'-O-methoxyethyl thymidine
  modified_base 9: mod_base = OTHER; note = 2'-O-methoxyethyl guanosine
  modified_base 10: mod_base = OTHER; note = 2'-O-methoxyethyl adenosine
  modified_base 11: mod_base = OTHER; note = 2'-O-methoxyethyl adenosine
  modified_base 12: mod_base = OTHER; note = 2'-O-methoxyethyl guanosine
  modified_base 13: mod_base = OTHER; note = 2'-O-methoxyethyl 5-methylcytidine
  modified_base 14: mod_base = OTHER; note = 2'-O-methoxyethyl guanosine
  modified_base 15: mod_base = OTHER; note = 2'-O-methoxyethyl adenosine
  modified_base 16: mod_base = OTHER; note = 2'-O-methoxyethyl adenosine
  modified_base 17: mod_base = OTHER; note = 2'-O-methoxyethyl guanosine
  modified_base 18: mod_base = OTHER; note = 2'-O-methoxyethyl thymidine
  modified_base 19: mod_base = OTHER; note = 2'-O-methoxyethyl guanosine
  modified_base 20: mod_base = OTHER; note = 2'-O-methoxyethyl 5-methylcytidine
gcagaggtgaagcgaagtgc

SEQ ID NO: 20 - DNA, 20 bp, synthetic construct
  source 1..20: mol_type = other DNA
  modified_base 1: mod_base = OTHER; note = Locked nucleic acid with guanine base
  modified_base 2: mod_base = OTHER; note = 2'-O-methoxyethyl 5-methylcytidine
  modified_base 3: mod_base = OTHER; note = Locked nucleic acid with adenine base
  modified_base 4: mod_base = OTHER; note = 2'-O-methoxyethyl guanosine
  modified_base 5: mod_base = OTHER; note = 2'-O-methoxyethyl adenosine
  modified_base 6: mod_base = OTHER; note = 2'-O-methoxyethyl guanosine
  modified_base 7: mod_base = OTHER; note = 2'-O-methoxyethyl guanosine
  modified_base 8: mod_base = OTHER; note = 2'-O-methoxyethyl thymidine
  modified_base 9: mod_base = OTHER; note = 2'-O-methoxyethyl guanosine
  modified_base 10: mod_base = OTHER; note = 2'-O-methoxyethyl adenosine
  modified_base 13: mod_base = OTHER; note = 2'-deoxy 5-methylcytidine
  modified_base 15: mod_base = OTHER; note = 2'-O-methoxyethyl adenosine
  modified_base 16: mod_base = OTHER; note = 2'-O-methoxyethyl adenosine
  modified_base 17: mod_base = OTHER; note = 2'-O-methoxyethyl guanosine
  modified_base 18: mod_base = OTHER; note = 2'-O-methoxyethyl thymidine
  modified_base 19: mod_base = OTHER; note = 2'-O-methoxyethyl guanosine
  modified_base 20: mod_base = OTHER; note = 2'-O-methoxyethyl 5-methylcytidine
  misc_feature 1..10: note = RNA
  misc_feature 11..14: note = DNA
  misc_feature 15..20: note = RNA
gcagaggtgaagcgaagtgc

SEQ ID NO: 21 - DNA, 20 bp, synthetic construct
  source 1..20: mol_type = other DNA
  modified_base 1: mod_base = OTHER; note = Locked nucleic acid with guanine base
  modified_base 2: mod_base = OTHER; note = 2'-O-methoxyethyl 5-methylcytidine
  modified_base 3: mod_base = OTHER; note = Locked nucleic acid with adenine base
  modified_base 4: mod_base = OTHER; note = 2'-O-methoxyethyl guanosine
  modified_base 5: mod_base = OTHER; note = 2'-O-methoxyethyl adenosine
  modified_base 6: mod_base = OTHER; note = 2'-O-methoxyethyl guanosine
  modified_base 7: mod_base = OTHER; note = 2'-O-methoxyethyl guanosine
  modified_base 8: mod_base = OTHER; note = 2'-O-methoxyethyl thymidine
  modified_base 9: mod_base = OTHER; note = 2'-O-methoxyethyl guanosine
  modified_base 13: mod_base = OTHER; note = 2'-deoxy 5-methylcytidine
  modified_base 15: mod_base = OTHER; note = 2'-O-methoxyethyl adenosine
  modified_base 16: mod_base = OTHER; note = 2'-O-methoxyethyl adenosine
  modified_base 17: mod_base = OTHER; note = 2'-O-methoxyethyl guanosine
  modified_base 18: mod_base = OTHER; note = 2'-O-methoxyethyl thymidine
  modified_base 19: mod_base = OTHER; note = 2'-O-methoxyethyl guanosine
  modified_base 20: mod_base = OTHER; note = 2'-O-methoxyethyl 5-methylcytidine
  misc_feature 1..9: note = RNA
  misc_feature 10..14: note = DNA
  misc_feature 15..20: note = RNA
gcagaggtgaagcgaagtgc

SEQ ID NO: 22 - DNA, 20 bp, synthetic construct
  source 1..20: mol_type = other DNA
  modified_base 1: mod_base = OTHER; note = Locked nucleic acid with guanine base
  modified_base 2: mod_base = OTHER; note = 2'-O-methoxyethyl 5-methylcytidine
  modified_base 3: mod_base = OTHER; note = Locked nucleic acid with adenine base
  modified_base 4: mod_base = OTHER; note = 2'-O-methoxyethyl guanosine
  modified_base 5: mod_base = OTHER; note = 2'-O-methoxyethyl adenosine
  modified_base 6: mod_base = OTHER; note = 2'-O-methoxyethyl guanosine
  modified_base 7: mod_base = OTHER; note = 2'-O-methoxyethyl guanosine
  modified_base 8: mod_base = OTHER; note = 2'-O-methoxyethyl thymidine
  modified_base 13: mod_base = OTHER; note = 2'-deoxy 5-methylcytidine
  modified_base 15: mod_base = OTHER; note = 2'-O-methoxyethyl adenosine
  modified_base 16: mod_base = OTHER; note = 2'-O-methoxyethyl adenosine
  modified_base 17: mod_base = OTHER; note = 2'-O-methoxyethyl guanosine
  modified_base 18: mod_base = OTHER; note = 2'-O-methoxyethyl thymidine
  modified_base 19: mod_base = OTHER; note = 2'-O-methoxyethyl guanosine
  modified_base 20: mod_base = OTHER; note = 2'-O-methoxyethyl 5-methylcytidine
  misc_feature 1..8: note = RNA
  misc_feature 9..14: note = DNA
  misc_feature 15..20: note = RNA
gcagaggtgaagcgaagtgc

SEQ ID NO: 23 - DNA, 20 bp, synthetic construct
  source 1..20: mol_type = other DNA
  modified_base 1: mod_base = OTHER; note = Locked nucleic acid with guanine base
  modified_base 2: mod_base = OTHER; note = 2'-O-methoxyethyl 5-methylcytidine
  modified_base 3: mod_base = OTHER; note = Locked nucleic acid with adenine base
  modified_base 4: mod_base = OTHER; note = 2'-O-methoxyethyl guanosine
  modified_base 5: mod_base = OTHER; note = 2'-O-methoxyethyl adenosine
  modified_base 6: mod_base = OTHER; note = 2'-O-methoxyethyl guanosine
  modified_base 7: mod_base = OTHER; note = 2'-O-methoxyethyl guanosine
  modified_base 13: mod_base = OTHER; note = 2'-deoxy 5-methylcytidine
  modified_base 14: mod_base = OTHER; note = 2'-O-methoxyethyl guanosine
  modified_base 15: mod_base = OTHER; note = 2'-O-methoxyethyl adenosine
  modified_base 16: mod_base = OTHER; note = 2'-O-methoxyethyl adenosine
  modified_base 17: mod_base = OTHER; note = 2'-O-methoxyethyl guanosine
  modified_base 18: mod_base = OTHER; note = 2'-O-methoxyethyl thymidine
  modified_base 19: mod_base = OTHER; note = 2'-O-methoxyethyl guanosine
  modified_base 20: mod_base = OTHER; note = 2'-O-methoxyethyl 5-methylcytidine
  misc_feature 1..7: note = RNA
  misc_feature 8..13: note = DNA
  misc_feature 14..20: note = RNA
gcagaggtgaagcgaagtgc

SEQ ID NO: 24 - DNA, 20 bp, synthetic construct
  source 1..20: mol_type = other DNA
  modified_base 1: mod_base = OTHER; note = Locked nucleic acid with guanine base
  modified_base 2: mod_base = OTHER; note = 2'-O-methoxyethyl 5-methylcytidine
  modified_base 3: mod_base = OTHER; note = Locked nucleic acid with adenine base
  modified_base 4: mod_base = OTHER; note = 2'-O-methoxyethyl guanosine
  modified_base 5: mod_base = OTHER; note = 2'-O-methoxyethyl adenosine
  modified_base 6: mod_base = OTHER; note = 2'-O-methoxyethyl guanosine
  modified_base 7: mod_base = OTHER; note = 2'-O-methoxyethyl guanosine
  modified_base 13: mod_base = OTHER; note = 2'-deoxy 5-methylcytidine
  modified_base 15: mod_base = OTHER; note = 2'-O-methoxyethyl adenosine
  modified_base 16: mod_base = OTHER; note = 2'-O-methoxyethyl adenosine
  modified_base 17: mod_base = OTHER; note = 2'-O-methoxyethyl guanosine
  modified_base 18: mod_base = OTHER; note = 2'-O-methoxyethyl thymidine
  modified_base 19: mod_base = OTHER; note = 2'-O-methoxyethyl guanosine
  modified_base 20: mod_base = OTHER; note = 2'-O-methoxyethyl 5-methylcytidine
  misc_feature 1..7: note = RNA
  misc_feature 8..14: note = DNA
  misc_feature 15..20: note = RNA
gcagaggtgaagcgaagtgc

SEQ ID NO: 25 - DNA, 20 bp, synthetic construct
  source 1..20: mol_type = other DNA
  modified_base 1: mod_base = OTHER; note = Locked nucleic acid with guanine base
  modified_base 2: mod_base = OTHER; note = 2'-O-methoxyethyl 5-methylcytidine
  modified_base 3: mod_base = OTHER; note = Locked nucleic acid with adenine base
  modified_base 4: mod_base = OTHER; note = 2'-O-methoxyethyl guanosine
  modified_base 5: mod_base = OTHER; note = 2'-O-methoxyethyl adenosine
  modified_base 6: mod_base = OTHER; note = 2'-O-methoxyethyl guanosine
  modified_base 13: mod_base = OTHER; note = 2'-deoxy 5-methylcytidine
  modified_base 15: mod_base = OTHER; note = 2'-O-methoxyethyl adenosine
  modified_base 16: mod_base = OTHER; note = 2'-O-methoxyethyl adenosine
  modified_base 17: mod_base = OTHER; note = 2'-O-methoxyethyl guanosine
  modified_base 18: mod_base = OTHER; note = 2'-O-methoxyethyl thymidine
  modified_base 19: mod_base = OTHER; note = 2'-O-methoxyethyl guanosine
  modified_base 20: mod_base = OTHER; note = 2'-O-methoxyethyl 5-methylcytidine
  misc_feature 1..6: note = RNA
  misc_feature 7..14: note = DNA
  misc_feature 15..20: note = RNA
gcagaggtgaagcgaagtgc

SEQ ID NO: 26 - DNA, 20 bp, synthetic construct
  source 1..20: mol_type = other DNA
  modified_base 1: mod_base = OTHER; note = Locked nucleic acid with guanine base
  modified_base 2: mod_base = OTHER; note = 2'-O-methoxyethyl 5-methylcytidine
  modified_base 3: mod_base = OTHER; note = Locked nucleic acid with adenine base
  modified_base 4: mod_base = OTHER; note = 2'-O-methoxyethyl guanosine
  modified_base 5: mod_base = OTHER; note = 2'-O-methoxyethyl adenosine
  modified_base 6: mod_base = OTHER; note = 2'-O-methoxyethyl guanosine
  modified_base 10: mod_base = OTHER; note = 2'-O-methoxyethyl adenosine
  modified_base 13: mod_base = OTHER; note = 2'-deoxy 5-methylcytidine
  modified_base 15: mod_base = OTHER; note = 2'-O-methoxyethyl adenosine
  modified_base 16: mod_base = OTHER; note = 2'-O-methoxyethyl adenosine
  modified_base 17: mod_base = OTHER; note = 2'-O-methoxyethyl guanosine
  modified_base 18: mod_base = OTHER; note = 2'-O-methoxyethyl thymidine
  modified_base 19: mod_base = OTHER; note = 2'-O-methoxyethyl guanosine
  modified_base 20: mod_base = OTHER; note = 2'-O-methoxyethyl 5-methylcytidine
  misc_feature 1..6: note = RNA
  misc_feature 7..9: note = DNA
  misc_feature 10: note = RNA
  misc_feature 11..14: note = DNA
  misc_feature 15..20: note = RNA
gcagaggtgaagcgaagtgc

SEQ ID NO: 27 - DNA, 20 bp, synthetic construct
  source 1..20: mol_type = other DNA
  modified_base 1: mod_base = OTHER; note = 2'-O-methoxyethyl guanosine
  modified_base 2: mod_base = OTHER; note = 2'-deoxy 5-methylcytidine
  modified_base 3: mod_base = OTHER; note = Locked nucleic acid with adenine base
  modified_base 4: mod_base = OTHER; note = 2'-O-methoxyethyl guanosine
  modified_base 5: mod_base = OTHER; note = 2'-O-methoxyethyl adenosine
  modified_base 6: mod_base = OTHER; note = 2'-O-methoxyethyl guanosine
  modified_base 7: mod_base = OTHER; note = 2'-O-methoxyethyl guanosine
  modified_base 8: mod_base = OTHER; note = 2'-O-methoxyethyl thymidine
  modified_base 13: mod_base = OTHER; note = 2'-deoxy 5-methylcytidine
  modified_base 15: mod_base = OTHER; note = 2'-O-methoxyethyl adenosine
  modified_base 16: mod_base = OTHER; note = Locked nucleic acid with adenine base
  modified_base 17: mod_base = OTHER; note = Locked nucleic acid with guanine base
  modified_base 18: mod_base = OTHER; note = 2'-O-methoxyethyl thymidine
  modified_base 19: mod_base = OTHER; note = 2'-O-methoxyethyl guanosine
  modified_base 20: mod_base = OTHER; note = 2'-O-methoxyethyl 5-methylcytidine
  misc_feature 1: note = RNA
  misc_feature 2: note = DNA
  misc_feature 3..8: note = RNA
  misc_feature 9..14: note = DNA
  misc_feature 15..20: note = RNA
gcagaggtgaagcgaagtgc

SEQ ID NO: 28 - DNA, 20 bp, synthetic construct
  source 1..20: mol_type = other DNA
  modified_base 1: mod_base = OTHER; note = 2'-O-methoxyethyl guanosine
  modified_base 2: mod_base = OTHER; note = 2'-deoxy 5-methylcytidine
  modified_base 3: mod_base = OTHER; note = Locked nucleic acid with adenine base
  modified_base 4: mod_base = OTHER; note = 2'-O-methoxyethyl guanosine
  modified_base 5: mod_base = OTHER; note = 2'-O-methoxyethyl adenosine
  modified_base 6: mod_base = OTHER; note = 2'-O-methoxyethyl guanosine
  modified_base 13: mod_base = OTHER; note = 2'-deoxy 5-methylcytidine
  modified_base 15: mod_base = OTHER; note = 2'-O-methoxyethyl adenosine
  modified_base 16: mod_base = OTHER; note = Locked nucleic acid with adenine base
  modified_base 17: mod_base = OTHER; note = Locked nucleic acid with guanine base
  modified_base 18: mod_base = OTHER; note = 2'-O-methoxyethyl thymidine
  modified_base 19: mod_base = OTHER; note = 2'-O-methoxyethyl guanosine
  modified_base 20: mod_base = OTHER; note = 2'-O-methoxyethyl 5-methylcytidine
  misc_feature 1: note = RNA
  misc_feature 2: note = DNA
  misc_feature 3..6: note = RNA
  misc_feature 7..14: note = DNA
  misc_feature 15..20: note = RNA
gcagaggtgaagcgaagtgc

SEQ ID NO: 29 - DNA, 20 bp, synthetic construct
  source 1..20: mol_type = other DNA
  modified_base 1: mod_base = OTHER; note = 2'-O-methoxyethyl guanosine
  modified_base 2: mod_base = OTHER; note = 2'-deoxy 5-methylcytidine
  modified_base 3: mod_base = OTHER; note = Locked nucleic acid with adenine base
  modified_base 4: mod_base = OTHER; note = 2'-O-methoxyethyl guanosine
  modified_base 5: mod_base = OTHER; note = 2'-O-methoxyethyl adenosine
  modified_base 6: mod_base = OTHER; note = 2'-O-methoxyethyl guanosine
  modified_base 10: mod_base = OTHER; note = 2'-O-methoxyethyl adenosine
  modified_base 13: mod_base = OTHER; note = 2'-deoxy 5-methylcytidine
  modified_base 15: mod_base = OTHER; note = 2'-O-methoxyethyl adenosine
  modified_base 16: mod_base = OTHER; note = Locked nucleic acid with adenine base
  modified_base 17: mod_base = OTHER; note = Locked nucleic acid with guanine base
  modified_base 18: mod_base = OTHER; note = 2'-O-methoxyethyl thymidine
  modified_base 19: mod_base = OTHER; note = 2'-O-methoxyethyl guanosine
  modified_base 20: mod_base = OTHER; note = 2'-O-methoxyethyl 5-methylcytidine
  misc_feature 1: note = RNA
  misc_feature 2: note = DNA
  misc_feature 3..6: note = RNA
  misc_feature 7..9: note = DNA
  misc_feature 10: note = RNA
  misc_feature 11..14: note = DNA
  misc_feature 15..20: note = RNA
gcagaggtgaagcgaagtgc

SEQ ID NO: 30 - DNA, 19 bp, synthetic construct
  source 1..19: mol_type = other DNA
  modified_base 1: mod_base = OTHER; note = 2'-O-methoxyethyl guanosine
  modified_base 2: mod_base = OTHER; note = 2'-deoxy 5-methylcytidine
  modified_base 3: mod_base = OTHER; note = Locked nucleic acid with adenine base
  modified_base 4: mod_base = OTHER; note = 2'-O-methoxyethyl guanosine
  modified_base 5: mod_base = OTHER; note = 2'-O-methoxyethyl adenosine
  modified_base 6: mod_base = OTHER; note = 2'-O-methoxyethyl guanosine
  modified_base 13: mod_base = OTHER; note = 2'-deoxy 5-methylcytidine
  modified_base 15: mod_base = OTHER; note = 2'-O-methoxyethyl adenosine
  modified_base 16: mod_base = OTHER; note = Locked nucleic acid with adenine base
  modified_base 17: mod_base = OTHER; note = Locked nucleic acid with guanine base
  modified_base 18: mod_base = OTHER; note = 2'-O-methoxyethyl thymidine
  modified_base 19: mod_base = OTHER; note = 2'-O-methoxyethyl guanosine
  misc_feature 1: note = RNA
  misc_feature 2: note = DNA
  misc_feature 3..6: note = RNA
  misc_feature 7..14: note = DNA
  misc_feature 15..19: note = RNA
gcagaggtgaagcgaagtg

SEQ ID NO: 31 - DNA, 18 bp, synthetic construct
  source 1..18: mol_type = other DNA
  modified_base 1: mod_base = OTHER; note = 2'-deoxy 5-methylcytidine
  modified_base 2: mod_base = OTHER; note = Locked nucleic acid with adenine base
  modified_base 3: mod_base = OTHER; note = 2'-O-methoxyethyl guanosine
  modified_base 4: mod_base = OTHER; note = 2'-O-methoxyethyl adenosine
  modified_base 5: mod_base = OTHER; note = 2'-O-methoxyethyl guanosine
  modified_base 12: mod_base = OTHER; note = 2'-deoxy 5-methylcytidine
  modified_base 14: mod_base = OTHER; note = 2'-O-methoxyethyl adenosine
  modified_base 15: mod_base = OTHER; note = Locked nucleic acid with adenine base
  modified_base 16: mod_base = OTHER; note = Locked nucleic acid with guanine base
  modified_base 17: mod_base = OTHER; note = 2'-O-methoxyethyl thymidine
  modified_base 18: mod_base = OTHER; note = 2'-O-methoxyethyl guanosine
  misc_feature 1: note = DNA
  misc_feature 2..5: note = RNA
  misc_feature 6..13: note = DNA
  misc_feature 14..18: note = RNA
cagaggtgaagcgaagtg

SEQ ID NO: 32 - DNA, 16 bp, synthetic construct
  source 1..16: mol_type = other DNA
  modified_base 1: mod_base = OTHER; note = Locked nucleic acid with adenine base
  modified_base 2: mod_base = OTHER; note = 2'-O-methoxyethyl guanosine
  modified_base 3: mod_base = OTHER; note = 2'-O-methoxyethyl adenosine
  modified_base 4: mod_base = OTHER; note = 2'-O-methoxyethyl guanosine
  modified_base 11: mod_base = OTHER; note = 2'-deoxy 5-methylcytidine
  modified_base 13: mod_base = OTHER; note = 2'-O-methoxyethyl adenosine
  modified_base 14: mod_base = OTHER; note = Locked nucleic acid with adenine base
  modified_base 15: mod_base = OTHER; note = Locked nucleic acid with guanine base
  modified_base 16: mod_base = OTHER; note = 2'-O-methoxyethyl thymidine
  misc_feature 1..4: note = RNA
  misc_feature 5..12: note = DNA
  misc_feature 13..16: note = RNA
agaggtgaagcgaagt

SEQ ID NO: 33 - DNA, 20 bp, synthetic construct
  source 1..20: mol_type = other DNA
  modified_base 1: mod_base = OTHER; note = 2'-O-methoxyethyl guanosine
  modified_base 2: mod_base = OTHER; note = 2'-O-methoxyethyl 5-methylcytidine
  modified_base 3: mod_base = OTHER; note = 2'-O-methoxyethyl adenosine
  modified_base 4: mod_base = OTHER; note = 2'-O-methoxyethyl guanosine
  modified_base 5: mod_base = OTHER; note = 2'-O-methoxyethyl adenosine
  modified_base 6: mod_base = OTHER; note = 2'fluoro 2'-deoxy guanosine
  modified_base 7: mod_base = OTHER; note = 2'fluoro 2'-deoxy guanosine
  modified_base 9: mod_base = OTHER; note = 2'fluoro 2'-deoxy guanosine
  modified_base 10: mod_base = OTHER; note = 2'-fluoro 2'-deoxyadenosine
  modified_base 11: mod_base = OTHER; note = 2'-fluoro 2'-deoxyadenosine
  modified_base 12: mod_base = OTHER; note = 2'fluoro 2'-deoxy guanosine
  modified_base 13: mod_base = OTHER; note = 2'fluoro 2'-deoxy cytidine
  modified_base 14: mod_base = OTHER; note = 2'fluoro 2'-deoxy guanosine
  modified_base 15: mod_base = OTHER; note = 2'-fluoro 2'-deoxyadenosine
  modified_base 16: mod_base = OTHER; note = 2'-O-methoxyethyl adenosine
  modified_base 17: mod_base = OTHER; note = 2'-O-methoxyethyl guanosine
  modified_base 18: mod_base = OTHER; note = 2'-O-methoxyethyl thymidine
  modified_base 19: mod_base = OTHER; note = 2'-O-methoxyethyl guanosine
  modified_base 20: mod_base = OTHER; note = 2'-O-methoxyethyl 5-methylcytidine
  misc_feature 1..7: note = RNA
  misc_feature 8: note = DNA
  misc_feature 9..20: note = RNA
gcagaggtgaagcgaagtgc

SEQ ID NO: 34 - DNA, 20 bp, synthetic construct
  source 1..20: mol_type = other DNA
  modified_base 1: mod_base = OTHER; note = 2'-O-methoxyethyl guanosine
  modified_base 2: mod_base = OTHER; note = 2'-O-methoxyethyl 5-methylcytidine
  modified_base 3: mod_base = OTHER; note = 2'-O-methoxyethyl adenosine
  modified_base 4: mod_base = OTHER; note = 2'-O-methoxyethyl guanosine
  modified_base 5: mod_base = OTHER; note = 2'-O-methoxyethyl adenosine
  modified_base 6: mod_base = OTHER; note = 2'fluoro 2'-deoxy guanosine
  modified_base 10: mod_base = OTHER; note = 2'-fluoro 2'-deoxyadenosine
  modified_base 12: mod_base = OTHER; note = 2'fluoro 2'-deoxy guanosine
  modified_base 13: mod_base = OTHER; note = 2'-deoxy 5-methylcytidine
  modified_base 14: mod_base = OTHER; note = 2'fluoro 2'-deoxy guanosine
  modified_base 16: mod_base = OTHER; note = 2'-O-methoxyethyl adenosine
  modified_base 17: mod_base = OTHER; note = 2'-O-methoxyethyl guanosine
  modified_base 18: mod_base = OTHER; note = 2'-O-methoxyethyl thymidine
  modified_base 19: mod_base = OTHER; note = 2'-O-methoxyethyl guanosine
  modified_base 20: mod_base = OTHER; note = 2'-O-methoxyethyl 5-methylcytidine
  misc_feature 1..6: note = RNA
  misc_feature 7..9: note = DNA
  misc_feature 10: note = RNA
  misc_feature 11: note = DNA
  misc_feature 12: note = RNA
  misc_feature 13: note = DNA
  misc_feature 14: note = RNA
  misc_feature 15: note = DNA
  misc_feature 16..20: note = RNA
gcagaggtgaagcgaagtgc

SEQ ID NO: 35 - DNA, 20 bp, synthetic construct
  source 1..20: mol_type = other DNA
  modified_base 1: mod_base = OTHER; note = 2'-O-methoxyethyl guanosine
  modified_base 2: mod_base = OTHER; note = 2'-O-methoxyethyl 5-methylcytidine
  modified_base 3: mod_base = OTHER; note = 2'-O-methoxyethyl adenosine
  modified_base 4: mod_base = OTHER; note = 2'-O-methoxyethyl guanosine
  modified_base 5: mod_base = OTHER; note = 2'-O-methoxyethyl adenosine
  modified_base 6: mod_base = OTHER; note = 2'fluoro 2'-deoxy guanosine
  modified_base 10: mod_base = OTHER; note = 2'-fluoro 2'-deoxyadenosine
  modified_base 13: mod_base = OTHER; note = 2'-deoxy 5-methylcytidine
  modified_base 14: mod_base = OTHER; note = 2'fluoro 2'-deoxy guanosine
  modified_base 16: mod_base = OTHER; note = 2'-O-methoxyethyl adenosine
  modified_base 17: mod_base = OTHER; note = 2'-O-methoxyethyl guanosine
  modified_base 18: mod_base = OTHER; note = 2'-O-methoxyethyl thymidine
  modified_base 19: mod_base = OTHER; note = 2'-O-methoxyethyl guanosine
  modified_base 20: mod_base = OTHER; note = 2'-O-methoxyethyl 5-methylcytidine
  misc_feature 1..6: note = RNA
  misc_feature 7..9: note = DNA
  misc_feature 10: note = RNA
  misc_feature 11..13: note = DNA
  misc_feature 14: note = RNA
  misc_feature 15: note = DNA
  misc_feature 16..20: note = RNA
gcagaggtgaagcgaagtgc

SEQ ID NO: 36 - DNA, 20 bp, synthetic construct
  source 1..20: mol_type = other DNA
  modified_base 1: mod_base = OTHER; note = 2'fluoro 2'-deoxy guanosine
  modified_base 2: mod_base = OTHER; note = 2'-deoxy 5-methylcytidine
  modified_base 3: mod_base = OTHER; note = 2'-fluoro 2'-deoxyadenosine
  modified_base 5: mod_base = OTHER; note = 2'-fluoro 2'-deoxyadenosine
  modified_base 7: mod_base = OTHER; note = 2'fluoro 2'-deoxy guanosine
  modified_base 9: mod_base = OTHER; note = 2'fluoro 2'-deoxy guanosine
  modified_base 11: mod_base = OTHER; note = 2'-O-methoxyethyl adenosine
  modified_base 12: mod_base = OTHER; note = 2'-O-methoxyethyl guanosine
  modified_base 13: mod_base = OTHER; note = 2'-O-methoxyethyl 5-methylcytidine
  modified_base 14: mod_base = OTHER; note = 2'-O-methoxyethyl guanosine
  modified_base 15: mod_base = OTHER; note = 2'-O-methoxyethyl adenosine
  modified_base 16: mod_base = OTHER; note = 2'-O-methoxyethyl adenosine
  modified_base 17: mod_base = OTHER; note = 2'-O-methoxyethyl guanosine
  modified_base 18: mod_base = OTHER; note = 2'-O-methoxyethyl thymidine
  modified_base 19: mod_base = OTHER; note = 2'-O-methoxyethyl guanosine
  modified_base 20: mod_base = OTHER; note = 2'-O-methoxyethyl 5-methylcytidine
  misc_feature 1: note = RNA
  misc_feature 2: note = DNA
  misc_feature 3: note = RNA
  misc_feature 4: note = DNA
  misc_feature 5: note = RNA
  misc_feature 6: note = DNA
  misc_feature 7: note = RNA
  misc_feature 8: note = DNA
  misc_feature 9: note = RNA
  misc_feature 10: note = DNA
  misc_feature 11..20: note = RNA
gcagaggtgaagcgaagtgc

SEQ ID NO: 37 - DNA, 20 bp, synthetic construct
  source 1..20: mol_type = other DNA
  modified_base 1: mod_base = OTHER; note = 2'-O-methoxyethyl guanosine
  modified_base 2: mod_base = OTHER; note = 2'-O-methoxyethyl adenosine
  modified_base 3: mod_base = OTHER; note = 2'-O-methoxyethyl 5-methylcytidine
  modified_base 4: mod_base = OTHER; note = 2'-O-methoxyethyl guanosine
  modified_base 5: mod_base = OTHER; note = 2'-O-methoxyethyl thymidine
  modified_base 7: mod_base = OTHER; note = 2'-deoxy 5-methylcytidine
  modified_base 16: mod_base = OTHER; note = 2'-O-methoxyethyl adenosine
  modified_base 17: mod_base = OTHER; note = 2'-O-methoxyethyl guanosine
  modified_base 18: mod_base = OTHER; note = 2'-O-methoxyethyl 5-methylcytidine
  modified_base 19: mod_base = OTHER; note = 2'-O-methoxyethyl guanosine
  modified_base 20: mod_base = OTHER; note = 2'-O-methoxyethyl adenosine
  misc_feature 1..5: note = RNA
  misc_feature 6..15: note = DNA
  misc_feature 16..20: note = RNA
gacgtgcagaggtgaagcga

SEQ ID NO: 38 - DNA, 20 bp, synthetic construct
  source 1..20: mol_type = other DNA
  modified_base 1: mod_base = OTHER; note = 2'-O-methoxyethyl adenosine
  modified_base 2: mod_base = OTHER; note = 2'-O-methoxyethyl 5-methylcytidine
  modified_base 3: mod_base = OTHER; note = 2'-O-methoxyethyl guanosine
  modified_base 4: mod_base = OTHER; note = 2'-O-methoxyethyl thymidine
  modified_base 5: mod_base = OTHER; note = 2'-O-methoxyethyl guanosine
  modified_base 6: mod_base = OTHER; note = 2'-deoxy 5-methylcytidine
  modified_base 16: mod_base = OTHER; note = 2'-O-methoxyethyl guanosine
  modified_base 17: mod_base = OTHER; note = 2'-O-methoxyethyl 5-methylcytidine
  modified_base 18: mod_base = OTHER; note = 2'-O-methoxyethyl guanosine
  modified_base 19: mod_base = OTHER; note = 2'-O-methoxyethyl adenosine
  modified_base 20: mod_base = OTHER; note = 2'-O-methoxyethyl adenosine
  misc_feature 1..5: note = RNA
  misc_feature 6..15: note = DNA
  misc_feature 16..20: note = RNA
acgtgcagaggtgaagcgaa

SEQ ID NO: 39 - DNA, 20 bp, synthetic construct
  source 1..20: mol_type = other DNA
  modified_base 1: mod_base = OTHER; note = 2'-O-methoxyethyl 5-methylcytidine
  modified_base 2: mod_base = OTHER; note = 2'-O-methoxyethyl guanosine
  modified_base 3: mod_base = OTHER; note = 2'-O-methoxyethyl thymidine
  modified_base 4: mod_base = OTHER; note = 2'-O-methoxyethyl guanosine
  modified_base 5: mod_base = OTHER; note = 2'-O-methoxyethyl 5-methylcytidine
  modified_base 16: mod_base = OTHER; note = 2'-O-methoxyethyl 5-methylcytidine
  modified_base 17: mod_base = OTHER; note = 2'-O-methoxyethyl guanosine
  modified_base 18: mod_base = OTHER; note = 2'-O-methoxyethyl adenosine
  modified_base 19: mod_base = OTHER; note = 2'-O-methoxyethyl adenosine
  modified_base 20: mod_base = OTHER; note = 2'-O-methoxyethyl guanosine
  misc_feature 1..5: note = RNA
  misc_feature 6..15: note = DNA
  misc_feature 16..20: note = RNA
cgtgcagaggtgaagcgaag

SEQ ID NO: 40 - DNA, 20 bp, synthetic construct
  source 1..20: mol_type = other DNA
  modified_base 1: mod_base = OTHER; note = 2'-O-methoxyethyl guanosine
  modified_base 2: mod_base = OTHER; note = 2'-O-methoxyethyl thymidine
  modified_base 3: mod_base = OTHER; note = 2'-O-methoxyethyl guanosine
  modified_base 4: mod_base = OTHER; note = 2'-O-methoxyethyl 5-methylcytidine
  modified_base 5: mod_base = OTHER; note = 2'-O-methoxyethyl adenosine
  modified_base 15: mod_base = OTHER; note = 2'-deoxy 5-methylcytidine
  modified_base 16: mod_base = OTHER; note = 2'-O-methoxyethyl guanosine
  modified_base 17: mod_base = OTHER; note = 2'-O-methoxyethyl adenosine
  modified_base 18: mod_base = OTHER; note = 2'-O-methoxyethyl adenosine
  modified_base 19: mod_base = OTHER; note = 2'-O-methoxyethyl guanosine
  modified_base 20: mod_base = OTHER; note = 2'-O-methoxyethyl thymidine
  misc_feature 1..5: note = RNA
  misc_feature 6..15: note = DNA
  misc_feature 16..20: note = RNA
gtgcagaggtgaagcgaagt

SEQ ID NO: 41 - DNA, 20 bp, synthetic construct
  source 1..20: mol_type = other DNA
  modified_base 1: mod_base = OTHER; note = 2'-O-methoxyethyl thymidine
  modified_base 2: mod_base = OTHER; note = 2'-O-methoxyethyl guanosine
  modified_base 3: mod_base = OTHER; note = 2'-O-methoxyethyl 5-methylcytidine
  modified_base 4: mod_base = OTHER; note = 2'-O-methoxyethyl adenosine
  modified_base 5: mod_base = OTHER; note = 2'-O-methoxyethyl guanosine
  modified_base 14: mod_base = OTHER; note = 2'-deoxy 5-methylcytidine
  modified_base 16: mod_base = OTHER; note = 2'-O-methoxyethyl adenosine
  modified_base 17: mod_base = OTHER; note = 2'-O-methoxyethyl adenosine
  modified_base 18: mod_base = OTHER; note = 2'-O-methoxyethyl guanosine
  modified_base 19: mod_base = OTHER; note = 2'-O-methoxyethyl thymidine
  modified_base 20: mod_base = OTHER; note = 2'-O-methoxyethyl guanosine
  misc_feature 1..5: note = RNA
  misc_feature 6..15: note = DNA
  misc_feature 16..20: note = RNA
tgcagaggtgaagcgaagtg

SEQ ID NO: 42 - DNA, 20 bp, synthetic construct
  source 1..20: mol_type = other DNA
  modified_base 1: mod_base = OTHER; note = 2'-O-methoxyethyl guanosine
  modified_base 2: mod_base = OTHER; note = 2'-O-methoxyethyl 5-methylcytidine
  modified_base 3: mod_base = OTHER; note = 2'-O-methoxyethyl adenosine
  modified_base 4: mod_base = OTHER; note = 2'-O-methoxyethyl guanosine
  modified_base 5: mod_base = OTHER; note = 2'-O-methoxyethyl adenosine
  modified_base 10: mod_base = OTHER; note = 2'-O-methoxyethyl adenosine
  modified_base 13: mod_base = OTHER; note = 2'-deoxy 5-methylcytidine
  modified_base 16: mod_base = OTHER; note = 2'-O-methoxyethyl adenosine
  modified_base 17: mod_base = OTHER; note = 2'-O-methoxyethyl guanosine
  modified_base 18: mod_base = OTHER; note = 2'-O-methoxyethyl thymidine
  modified_base 19: mod_base = OTHER; note = 2'-O-methoxyethyl guanosine
  modified_base 20: mod_base = OTHER; note = 2'-O-methoxyethyl 5-methylcytidine
  misc_feature 1..5: note = RNA
  misc_feature 6..9: note = DNA
  misc_feature 10: note = RNA
  misc_feature 11..15: note = DNA
  misc_feature 16..20: note = RNA
gcagaggtgaagcgaagtgc

SEQ ID NO: 43 - DNA, 20 bp, synthetic construct
  source 1..20: mol_type = other DNA
  modified_base 1: mod_base = OTHER; note = 2'-O-methoxyethyl guanosine
  modified_base 2: mod_base = OTHER; note = 2'-O-methoxyethyl 5-methylcytidine
  modified_base 3: mod_base = OTHER; note = 2'-O-methoxyethyl adenosine
  modified_base 4: mod_base = OTHER; note = 2'-O-methoxyethyl guanosine
  modified_base 5: mod_base = OTHER; note = 2'-O-methoxyethyl adenosine
  modified_base 10: mod_base = OTHER; note = 2'-fluoro 2'-deoxyadenosine
  modified_base 13: mod_base = OTHER; note = 2'-deoxy 5-methylcytidine
  modified_base 16: mod_base = OTHER; note = 2'-O-methoxyethyl adenosine
  modified_base 17: mod_base = OTHER; note = 2'-O-methoxyethyl guanosine
  modified_base 18: mod_base = OTHER; note = 2'-O-methoxyethyl thymidine
  modified_base 19: mod_base = OTHER; note = 2'-O-methoxyethyl guanosine
  modified_base 20: mod_base = OTHER; note = 2'-O-methoxyethyl 5-methylcytidine
  misc_feature 1..5: note = RNA
  misc_feature 6..9: note = DNA
  misc_feature 10: note = RNA
  misc_feature 11..15: note = DNA
  misc_feature 16..20: note = RNA
gcagaggtgaagcgaagtgc

SEQ ID NO: 44 - DNA, 20 bp, synthetic construct
  source 1..20: mol_type = other DNA
  modified_base 1: mod_base = OTHER; note = 2'-O-methoxyethyl guanosine
  modified_base 2: mod_base = OTHER; note = 2'-O-methoxyethyl 5-methylcytidine
  modified_base 3: mod_base = OTHER; note = 2'-O-methoxyethyl adenosine
  modified_base 4: mod_base = OTHER; note = 2'-O-methoxyethyl guanosine
  modified_base 5: mod_base = OTHER; note = 2'-O-methoxyethyl adenosine
  modified_base 10: mod_base = OTHER; note = Locked nucleic acid with adenine base
  modified_base 13: mod_base = OTHER; note = 2'-deoxy 5-methylcytidine
  modified_base 16: mod_base = OTHER; note = 2'-O-methoxyethyl adenosine
  modified_base 17: mod_base = OTHER; note = 2'-O-methoxyethyl guanosine
  modified_base 18: mod_base = OTHER; note = 2'-O-methoxyethyl thymidine
  modified_base 19: mod_base = OTHER; note = 2'-O-methoxyethyl guanosine
  modified_base 20: mod_base = OTHER; note = 2'-O-methoxyethyl 5-methylcytidine
  misc_feature 1..5: note = RNA
  misc_feature 6..9: note = DNA
  misc_feature 10: note = RNA
  misc_feature 11..15: note = DNA
  misc_feature 16..20: note = RNA
gcagaggtgaagcgaagtgc

SEQ ID NO: 45 - DNA, 20 bp, synthetic construct
  source 1..20: mol_type = other DNA
  modified_base 1: mod_base = OTHER; note = 2'-O-methoxyethyl guanosine
  modified_base 2: mod_base = OTHER; note = 2'-O-methoxyethyl 5-methylcytidine
  modified_base 3: mod_base = OTHER; note = 2'-O-methoxyethyl adenosine
  modified_base 4: mod_base = OTHER; note = 2'-O-methoxyethyl guanosine
  modified_base 5: mod_base = OTHER; note = 2'-O-methoxyethyl adenosine
  modified_base 13: mod_base = OTHER; note = 2'-deoxy 5-methylcytidine
  modified_base 15: mod_base = OTHER; note = 2'-O-methoxyethyl adenosine
  modified_base 16: mod_base = OTHER; note = 2'-O-methoxyethyl adenosine
  modified_base 17: mod_base = OTHER; note = 2'-O-methoxyethyl guanosine
  modified_base 18: mod_base = OTHER; note = 2'-O-methoxyethyl thymidine
  modified_base 19: mod_base = OTHER; note = 2'-O-methoxyethyl guanosine
  modified_base 20: mod_base = OTHER; note = 2'-O-methoxyethyl 5-methylcytidine
  misc_feature 1..5: note = RNA
  misc_feature 6..14: note = DNA
  misc_feature 15..20: note = RNA
gcagaggtgaagcgaagtgc

SEQ ID NO: 46 - DNA, 20 bp, synthetic construct
  source 1..20: mol_type = other DNA
  modified_base 1: mod_base = OTHER; note = 2'-O-methoxyethyl guanosine
  modified_base 2: mod_base = OTHER; note = 2'-O-methoxyethyl 5-methylcytidine
  modified_base 3: mod_base = OTHER; note = 2'-O-methoxyethyl adenosine
  modified_base 4: mod_base = OTHER; note = 2'-O-methoxyethyl guanosine
  modified_base 5: mod_base = OTHER; note = 2'-O-methoxyethyl adenosine
  modified_base 13: mod_base = OTHER; note = 2'-deoxy 5-methylcytidine
  modified_base 14: mod_base = OTHER; note = 2'-O-methoxyethyl guanosine
  modified_base 16: mod_base = OTHER; note = 2'-O-methoxyethyl adenosine
  modified_base 17: mod_base = OTHER; note = 2'-O-methoxyethyl guanosine
  modified_base 18: mod_base = OTHER; note = 2'-O-methoxyethyl thymidine
  modified_base 19: mod_base = OTHER; note = 2'-O-methoxyethyl guanosine
  modified_base 20: mod_base = OTHER; note = 2'-O-methoxyethyl 5-methylcytidine
  misc_feature 1..5: note = RNA
  misc_feature 6..13: note = DNA
  misc_feature 14: note = RNA
  misc_feature 15: note = DNA
  misc_feature 16..20: note = RNA
gcagaggtgaagcgaagtgc

SEQ ID NO: 47 - DNA, 20 bp, synthetic construct
  source 1..20: mol_type = other DNA
  modified_base 1: mod_base = OTHER; note = 2'-O-methoxyethyl guanosine
  modified_base 2: mod_base = OTHER; note = 2'-O-methoxyethyl 5-methylcytidine
  modified_base 3: mod_base = OTHER; note = 2'-O-methoxyethyl adenosine
  modified_base 4: mod_base = OTHER; note = 2'-O-methoxyethyl guanosine
  modified_base 5: mod_base = OTHER; note = 2'-O-methoxyethyl adenosine
  modified_base 13: mod_base = OTHER; note = 2'-O-methoxyethyl 5-methylcytidine
  modified_base 16: mod_base = OTHER; note = 2'-O-methoxyethyl adenosine
  modified_base 17: mod_base = OTHER; note = 2'-O-methoxyethyl guanosine
  modified_base 18: mod_base = OTHER; note = 2'-O-methoxyethyl thymidine
  modified_base 19: mod_base = OTHER; note = 2'-O-methoxyethyl guanosine
  modified_base 20: mod_base = OTHER; note = 2'-O-methoxyethyl 5-methylcytidine
  misc_feature 1..5: note = RNA
  misc_feature 6..12: note = DNA
  misc_feature 13: note = RNA
  misc_feature 14..15: note = DNA
  misc_feature 16..20: note = RNA
gcagaggtgaagcgaagtgc

SEQ ID NO: 48 - DNA, 20 bp, synthetic construct
  source 1..20: mol_type = other DNA
  modified_base 1: mod_base = OTHER; note = 2'-O-methoxyethyl guanosine
  modified_base 2: mod_base = OTHER; note = 2'-O-methoxyethyl 5-methylcytidine
  modified_base 3: mod_base = OTHER; note = 2'-O-methoxyethyl adenosine
  modified_base 4: mod_base = OTHER; note = 2'-O-methoxyethyl guanosine
  modified_base 5: mod_base = OTHER; note = 2'-O-methoxyethyl adenosine
  modified_base 12: mod_base = OTHER; note = 2'-O-methoxyethyl guanosine
  modified_base 13: mod_base = OTHER; note = 2'-deoxy 5-methylcytidine
  modified_base 16: mod_base = OTHER; note = 2'-O-methoxyethyl adenosine
  modified_base 17: mod_base = OTHER; note = 2'-O-methoxyethyl guanosine
  modified_base 18: mod_base = OTHER; note = 2'-O-methoxyethyl thymidine
  modified_base 19: mod_base = OTHER; note = 2'-O-methoxyethyl guanosine
  modified_base 20: mod_base = OTHER; note = 2'-O-methoxyethyl 5-methylcytidine
  misc_feature 1..5: note = RNA
  misc_feature 6..11: note = DNA
  misc_feature 12: note = RNA
  misc_feature 13..15: note = DNA
  misc_feature 16..20: note = RNA
gcagaggtgaagcgaagtgc

SEQ ID NO: 49 - DNA, 20 bp, synthetic construct
  source 1..20: mol_type = other DNA
  modified_base 1: mod_base = OTHER; note = 2'-O-methoxyethyl guanosine
  modified_base 2: mod_base = OTHER; note = 2'-O-methoxyethyl 5-methylcytidine
  modified_base 3: mod_base = OTHER; note = 2'-O-methoxyethyl adenosine
  modified_base 4: mod_base = OTHER; note = 2'-O-methoxyethyl guanosine
  modified_base 5: mod_base = OTHER; note = 2'-O-methoxyethyl adenosine
  modified_base 11: mod_base = OTHER; note = 2'-O-methoxyethyl adenosine
  modified_base 13: mod_base = OTHER; note = 2'-deoxy 5-methylcytidine
  modified_base 16: mod_base = OTHER; note = 2'-O-methoxyethyl adenosine
  modified_base 17: mod_base = OTHER; note = 2'-O-methoxyethyl guanosine
  modified_base 18: mod_base = OTHER; note = 2'-O-methoxyethyl thymidine
  modified_base 19: mod_base = OTHER; note = 2'-O-methoxyethyl guanosine
  modified_base 20: mod_base = OTHER; note = 2'-O-methoxyethyl 5-methylcytidine
  misc_feature 1..5: note = RNA
  misc_feature 6..10: note = DNA
  misc_feature 11: note = RNA
  misc_feature 12..15: note = DNA
  misc_feature 16..20: note = RNA
gcagaggtgaagcgaagtgc

SEQ ID NO: 50 - DNA, 20 bp, synthetic construct
  source 1..20: mol_type = other DNA
  modified_base 1: mod_base = OTHER; note = 2'-O-methoxyethyl guanosine
  modified_base 2: mod_base = OTHER; note = 2'-O-methoxyethyl 5-methylcytidine
  modified_base 3: mod_base = OTHER; note = 2'-O-methoxyethyl adenosine
  modified_base 4: mod_base = OTHER; note = 2'-O-methoxyethyl guanosine
  modified_base 5: mod_base = OTHER; note = 2'-O-methoxyethyl adenosine
  modified_base 10: mod_base = OTHER; note = 2'-O-methoxyethyl adenosine
  modified_base 13: mod_base = OTHER; note = 2'-deoxy 5-methylcytidine
  modified_base 16: mod_base = OTHER; note = 2'-O-methoxyethyl adenosine
  modified_base 17: mod_base = OTHER; note = 2'-O-methoxyethyl guanosine
  modified_base 18: mod_base = OTHER; note = 2'-O-methoxyethyl thymidine
  modified_base 19: mod_base = OTHER; note = 2'-O-methoxyethyl guanosine
  modified_base 20: mod_base = OTHER; note = 2'-O-methoxyethyl 5-methylcytidine
  misc_feature 1..5: note = RNA
  misc_feature 6..9: note = DNA
  misc_feature 10: note = RNA
  misc_feature 11..15: note = DNA
  misc_feature 16..20: note = RNA
gcagaggtgaagcgaagtgc

SEQ ID NO: 51 - DNA, 20 bp, synthetic construct
  source 1..20: mol_type = other DNA
  modified_base 1: mod_base = OTHER; note = 2'-O-methoxyethyl guanosine
  modified_base 2: mod_base = OTHER; note = 2'-O-methoxyethyl 5-methylcytidine
  modified_base 3: mod_base = OTHER; note = 2'-O-methoxyethyl adenosine
  modified_base 4: mod_base = OTHER; note = 2'-O-methoxyethyl guanosine
  modified_base 5: mod_base = OTHER; note = 2'-O-methoxyethyl adenosine
  modified_base 9: mod_base = OTHER; note = 2'-O-methoxyethyl guanosine
  modified_base 13: mod_base = OTHER; note = 2'-deoxy 5-methylcytidine
  modified_base 16: mod_base = OTHER; note = 2'-O-methoxyethyl adenosine
  modified_base 17: mod_base = OTHER; note = 2'-O-methoxyethyl guanosine
  modified_base 18: mod_base = OTHER; note = 2'-O-methoxyethyl thymidine
  modified_base 19: mod_base = OTHER; note = 2'-O-methoxyethyl guanosine
  modified_base 20: mod_base = OTHER; note = 2'-O-methoxyethyl 5-methylcytidine
  misc_feature 1..5: note = RNA
  misc_feature 6..8: note = DNA
  misc_feature 9: note = RNA
  misc_feature 10..15: note = DNA
  misc_feature 16..20: note = RNA
gcagaggtgaagcgaagtgc

SEQ ID NO: 52 - DNA, 20 bp, synthetic construct
  source 1..20: mol_type = other DNA
  modified_base 1: mod_base = OTHER; note = 2'-O-methoxyethyl guanosine
  modified_base 2: mod_base = OTHER; note = 2'-O-methoxyethyl 5-methylcytidine
  modified_base 3: mod_base = OTHER; note = 2'-O-methoxyethyl adenosine
  modified_base 4: mod_base = OTHER; note = 2'-O-methoxyethyl guanosine
  modified_base 5: mod_base = OTHER; note = 2'-O-methoxyethyl adenosine
  modified_base 8: mod_base = OTHER; note = 2'-O-methoxyethyl thymidine
  modified_base 13: mod_base = OTHER; note = 2'-deoxy 5-methylcytidine
  modified_base 16: mod_base = OTHER; note = 2'-O-methoxyethyl adenosine
  modified_base 17: mod_base = OTHER; note = 2'-O-methoxyethyl guanosine
  modified_base 18: mod_base = OTHER; note = 2'-O-methoxyethyl thymidine
  modified_base 19: mod_base = OTHER; note = 2'-O-methoxyethyl guanosine
  modified_base 20: mod_base = OTHER; note = 2'-O-methoxyethyl 5-methylcytidine
  misc_feature 1..5: note = RNA
  misc_feature 6..7: note = DNA
  misc_feature 8: note = RNA
  misc_feature 9..15: note = DNA
  misc_feature 16..20: note = RNA
gcagaggtgaagcgaagtgc

SEQ ID NO: 53 - DNA, 20 bp, synthetic construct
  source 1..20: mol_type = other DNA
  modified_base 1: mod_base = OTHER; note = 2'-O-methoxyethyl guanosine
  modified_base 2: mod_base = OTHER; note = 2'-O-methoxyethyl 5-methylcytidine
  modified_base 3: mod_base = OTHER; note = 2'-O-methoxyethyl adenosine
  modified_base 4: mod_base = OTHER; note = 2'-O-methoxyethyl guanosine
  modified_base 5: mod_base = OTHER; note = 2'-O-methoxyethyl adenosine
  modified_base 7: mod_base = OTHER; note = 2'-O-methoxyethyl guanosine
  modified_base 13: mod_base = OTHER; note = 2'-deoxy 5-methylcytidine
  modified_base 16: mod_base = OTHER; note = 2'-O-methoxyethyl adenosine
  modified_base 17: mod_base = OTHER; note = 2'-O-methoxyethyl guanosine
  modified_base 18: mod_base = OTHER; note = 2'-O-methoxyethyl thymidine
  modified_base 19: mod_base = OTHER; note = 2'-O-methoxyethyl guanosine
  modified_base 20: mod_base = OTHER; note = 2'-O-methoxyethyl 5-methylcytidine
  misc_feature 1..5: note = RNA
  misc_feature 6: note = DNA
  misc_feature 7: note = RNA
  misc_feature 8..15: note = DNA
  misc_feature 16..20: note = RNA
gcagaggtgaagcgaagtgc

SEQ ID NO: 54 - DNA, 20 bp, synthetic construct
  source 1..20: mol_type = other DNA
  modified_base 1: mod_base = OTHER; note = 2'-O-methoxyethyl guanosine
  modified_base 2: mod_base = OTHER; note = 2'-O-methoxyethyl 5-methylcytidine
  modified_base 3: mod_base = OTHER; note = 2'-O-methoxyethyl adenosine
  modified_base 4: mod_base = OTHER; note = 2'-O-methoxyethyl guanosine
  modified_base 5: mod_base = OTHER; note = 2'-O-methoxyethyl adenosine
  modified_base 6: mod_base = OTHER; note = 2'-O-methoxyethyl guanosine
  modified_base 13: mod_base = OTHER; note = 2'-deoxy 5-methylcytidine
  modified_base 16: mod_base = OTHER; note = 2'-O-methoxyethyl adenosine
  modified_base 17: mod_base = OTHER; note = 2'-O-methoxyethyl guanosine
  modified_base 18: mod_base = OTHER; note = 2'-O-methoxyethyl thymidine
  modified_base 19: mod_base = OTHER; note = 2'-O-methoxyethyl guanosine
  modified_base 20: mod_base = OTHER; note = 2'-O-methoxyethyl 5-methylcytidine
  misc_feature 1..6: note = RNA
  misc_feature 7..15: note = DNA
  misc_feature 16..20: note = RNA
gcagaggtgaagcgaagtgc

SEQ ID NO: 55 - DNA, 20 bp, synthetic construct
  source 1..20: mol_type = other DNA
  modified_base 1: mod_base = OTHER; note = 2'-O-methoxyethyl guanosine
  modified_base 2: mod_base = OTHER; note = 2'-O-methoxyethyl 5-methylcytidine
  modified_base 3: mod_base = OTHER; note = 2'-O-methoxyethyl adenosine
  modified_base 4: mod_base = OTHER; note = 2'-O-methoxyethyl guanosine
  modified_base 5: mod_base = OTHER; note = 2'-O-methoxyethyl adenosine
  modified_base 7: mod_base = OTHER; note = 2'-O-methoxyethyl guanosine
  modified_base 13: mod_base = OTHER; note = 2'-deoxy 5-methylcytidine
  modified_base 14: mod_base = OTHER; note = 2'-O-methoxyethyl guanosine
  modified_base 16: mod_base = OTHER; note = 2'-O-methoxyethyl adenosine
  modified_base 17: mod_base = OTHER; note = 2'-O-methoxyethyl guanosine
  modified_base 18: mod_base = OTHER; note = 2'-O-methoxyethyl thymidine
  modified_base 19: mod_base = OTHER; note = 2'-O-methoxyethyl guanosine
  modified_base 20: mod_base = OTHER; note = 2'-O-methoxyethyl 5-methylcytidine
  misc_feature 1..5: note = RNA
  misc_feature 6: note = DNA
  misc_feature 7: note = RNA
  misc_feature 8..13: note = DNA
  misc_feature 14: note = RNA
  misc_feature 15: note = DNA
  misc_feature 16..20: note = RNA
gcagaggtgaagcgaagtgc

SEQ ID NO: 56 - DNA, 20 bp, synthetic construct
  source 1..20: mol_type = other DNA
  modified_base 1: mod_base = OTHER; note = 2'-O-methoxyethyl guanosine
  modified_base 2: mod_base = OTHER; note = 2'-O-methoxyethyl 5-methylcytidine
  modified_base 3: mod_base = OTHER; note = 2'-O-methoxyethyl adenosine
  modified_base 4: mod_base = OTHER; note = 2'-O-methoxyethyl guanosine
  modified_base 5: mod_base = OTHER; note = 2'-O-methoxyethyl adenosine
  modified_base 8: mod_base = OTHER; note = 2'-O-methoxyethyl thymidine
  modified_base 13: mod_base = OTHER; note = 2'-O-methoxyethyl 5-methylcytidine
  modified_base 16: mod_base = OTHER; note = 2'-O-methoxyethyl adenosine
  modified_base 17: mod_base = OTHER; note = 2'-O-methoxyethyl guanosine
  modified_base 18: mod_base = OTHER; note = 2'-O-methoxyethyl thymidine
  modified_base 19: mod_base = OTHER; note = 2'-O-methoxyethyl guanosine
  modified_base 20: mod_base = OTHER; note = 2'-O-methoxyethyl 5-methylcytidine
  misc_feature 1..5: note = RNA
  misc_feature 6..7: note = DNA
  misc_feature 8: note = RNA
  misc_feature 9..12: note = DNA
  misc_feature 13: note = RNA
  misc_feature 14..15: note = DNA
  misc_feature 16..20: note = RNA
gcagaggtgaagcgaagtgc

SEQ ID NO: 57 - DNA, 20 bp, synthetic construct
  source 1..20: mol_type = other DNA
  modified_base 1: mod_base = OTHER; note = 2'-O-methoxyethyl guanosine
  modified_base 2: mod_base = OTHER; note = 2'-O-methoxyethyl 5-methylcytidine
  modified_base 3: mod_base = OTHER; note = 2'-O-methoxyethyl adenosine
  modified_base 4: mod_base = OTHER; note = 2'-O-methoxyethyl guanosine
  modified_base 5: mod_base = OTHER; note = 2'-O-methoxyethyl adenosine
  modified_base 9: mod_base = OTHER; note = 2'-O-methoxyethyl guanosine
  modified_base 12: mod_base = OTHER; note = 2'-O-methoxyethyl guanosine
  modified_base 13: mod_base = OTHER; note = 2'-deoxy 5-methylcytidine
  modified_base 16: mod_base = OTHER; note = 2'-O-methoxyethyl adenosine
  modified_base 17: mod_base = OTHER; note = 2'-O-methoxyethyl guanosine
  modified_base 18: mod_base = OTHER; note = 2'-O-methoxyethyl thymidine
  modified_base 19: mod_base = OTHER; note = 2'-O-methoxyethyl guanosine
  modified_base 20: mod_base = OTHER; note = 2'-O-methoxyethyl 5-methylcytidine
  misc_feature 1..5: note = RNA
  misc_feature 6..8: note = DNA
  misc_feature 9: note = RNA
  misc_feature 10..11: note = DNA
  misc_feature 12: note = RNA
  misc_feature 13..15: note = DNA
  misc_feature 16..20: note = RNA
gcagaggtgaagcgaagtgc

SEQ ID NO: 58 - DNA, 20 bp, synthetic construct
  source 1..20: mol_type = other DNA
  modified_base 1: mod_base = OTHER; note = 2'-O-methoxyethyl guanosine
  modified_base 2: mod_base = OTHER; note = 2'-O-methoxyethyl 5-methylcytidine
  modified_base 3: mod_base = OTHER; note = 2'-O-methoxyethyl adenosine
  modified_base 4: mod_base = OTHER; note = 2'-O-methoxyethyl guanosine
  modified_base 5: mod_base = OTHER; note = 2'-O-methoxyethyl adenosine
  modified_base 10: mod_base = OTHER; note = 2'-O-methoxyethyl adenosine
  modified_base 11: mod_base = OTHER; note = 2'-O-methoxyethyl adenosine
  modified_base 13: mod_base = OTHER; note = 2'-deoxy 5-methylcytidine
  modified_base 16: mod_base = OTHER; note = 2'-O-methoxyethyl adenosine
  modified_base 17: mod_base = OTHER; note = 2'-O-methoxyethyl guanosine
  modified_base 18: mod_base = OTHER; note = 2'-O-methoxyethyl thymidine
  modified_base 19: mod_base = OTHER; note = 2'-O-methoxyethyl guanosine
  modified_base 20: mod_base = OTHER; note = 2'-O-methoxyethyl 5-methylcytidine
  misc_feature 1..5: note = RNA
  misc_feature 6..9: note = DNA
  misc_feature 10..11: note = RNA
  misc_feature 12..15: note = DNA
  misc_feature 16..20: note = RNA
gcagaggtgaagcgaagtgc

SEQ ID NO: 59 - DNA, 20 bp, synthetic construct
  source 1..20: mol_type = other DNA
  modified_base 1: mod_base = OTHER; note = 2'-O-methoxyethyl guanosine
  modified_base 2: mod_base = OTHER; note = 2'-O-methoxyethyl 5-methylcytidine
  modified_base 3: mod_base = OTHER; note = 2'-O-methoxyethyl adenosine
  modified_base 4: mod_base = OTHER; note = 2'-O-methoxyethyl guanosine
  modified_base 5: mod_base = OTHER; note = 2'-O-methoxyethyl adenosine
  modified_base 10: mod_base = OTHER; note = 2'-O-methoxyethyl adenosine
  modified_base 12: mod_base = OTHER; note = 2'-O-methoxyethyl guanosine
  modified_base 13: mod_base = OTHER; note = 2'-deoxy 5-methylcytidine
  modified_base 16: mod_base = OTHER; note = 2'-O-methoxyethyl adenosine
  modified_base 17: mod_base = OTHER; note = 2'-O-methoxyethyl guanosine
  modified_base 18: mod_base = OTHER; note = 2'-O-methoxyethyl thymidine
  modified_base 19: mod_base = OTHER; note = 2'-O-methoxyethyl guanosine
  modified_base 20: mod_base = OTHER; note = 2'-O-methoxyethyl 5-methylcytidine
  misc_feature 1..5: note = RNA
  misc_feature 6..9: note = DNA
  misc_feature 10: note = RNA
  misc_feature 11: note = DNA
  misc_feature 12: note = RNA
  misc_feature 13..15: note = DNA
  misc_feature 16..20: note = RNA
gcagaggtgaagcgaagtgc

SEQ ID NO: 60 - DNA, 20 bp, synthetic construct
  source 1..20: mol_type = other DNA
  modified_base 1: mod_base = OTHER; note = 2'-O-methoxyethyl guanosine
  modified_base 2: mod_base = OTHER; note = 2'-O-methoxyethyl 5-methylcytidine
  modified_base 3: mod_base = OTHER; note = 2'-O-methoxyethyl adenosine
  modified_base 4: mod_base = OTHER; note = 2'-O-methoxyethyl guanosine
  modified_base 5: mod_base = OTHER; note = 2'-O-methoxyethyl adenosine
  modified_base 10: mod_base = OTHER; note = 2'-O-methoxyethyl adenosine
  modified_base 13: mod_base = OTHER; note = 2'-O-methoxyethyl 5-methylcytidine
  modified_base 16: mod_base = OTHER; note = 2'-O-methoxyethyl adenosine
  modified_base 17: mod_base = OTHER; note = 2'-O-methoxyethyl guanosine
  modified_base 18: mod_base = OTHER; note = 2'-O-methoxyethyl thymidine
  modified_base 19: mod_base = OTHER; note = 2'-O-methoxyethyl guanosine
  modified_base 20: mod_base = OTHER; note = 2'-O-methoxyethyl 5-methylcytidine
  misc_feature 1..5: note = RNA
  misc_feature 6..9: note = DNA
  misc_feature 10: note = RNA
  misc_feature 11..12: note = DNA
  misc_feature 13: note = RNA
  misc_feature 14..15: note = DNA
  misc_feature 16..20: note = RNA
gcagaggtgaagcgaagtgc

SEQ ID NO: 61 - DNA, 20 bp, synthetic construct
  source 1..20: mol_type = other DNA
  modified_base 1: mod_base = OTHER; note = 2'-O-methoxyethyl guanosine
  modified_base 2: mod_base = OTHER; note = 2'-O-methoxyethyl 5-methylcytidine
  modified_base 3: mod_base = OTHER; note = 2'-O-methoxyethyl adenosine
  modified_base 4: mod_base = OTHER; note = 2'-O-methoxyethyl guanosine
  modified_base 5: mod_base = OTHER; note = 2'-O-methoxyethyl adenosine
  modified_base 10: mod_base = OTHER; note = 2'-O-methoxyethyl adenosine
  modified_base 13: mod_base = OTHER; note = 2'-deoxy 5-methylcytidine
  modified_base 14: mod_base = OTHER; note = 2'-O-methoxyethyl guanosine
  modified_base 16: mod_base = OTHER; note = 2'-O-methoxyethyl adenosine
  modified_base 17: mod_base = OTHER; note = 2'-O-methoxyethyl guanosine
  modified_base 18: mod_base = OTHER; note = 2'-O-methoxyethyl thymidine
  modified_base 19: mod_base = OTHER; note = 2'-O-methoxyethyl guanosine
  modified_base 20: mod_base = OTHER; note = 2'-O-methoxyethyl 5-methylcytidine
  misc_feature 1..5: note = RNA
  misc_feature 6..9: note = DNA
  misc_feature 10: note = RNA
  misc_feature 11..13: note = DNA
  misc_feature 14: note = RNA
  misc_feature 15: note = DNA
  misc_feature 16..20: note = RNA
gcagaggtgaagcgaagtgc

SEQ ID NO: 62 - DNA, 20 bp, synthetic construct
  source 1..20: mol_type = other DNA
  modified_base 1: mod_base = OTHER; note = 2'-O-methoxyethyl guanosine
  modified_base 2: mod_base = OTHER; note = 2'-O-methoxyethyl 5-methylcytidine
  modified_base 3: mod_base = OTHER; note = 2'-O-methoxyethyl adenosine
  modified_base 4: mod_base = OTHER; note = 2'-O-methoxyethyl guanosine
  modified_base 5: mod_base = OTHER; note = 2'-O-methoxyethyl adenosine
  modified_base 10: mod_base = OTHER; note = 2'-O-methoxyethyl adenosine
  modified_base 13: mod_base = OTHER; note = 2'-deoxy 5-methylcytidine
  modified_base 15: mod_base = OTHER; note = 2'-O-methoxyethyl adenosine
  modified_base 16: mod_base = OTHER; note = 2'-O-methoxyethyl adenosine
  modified_base 17: mod_base = OTHER; note = 2'-O-methoxyethyl guanosine
  modified_base 18: mod_base = OTHER; note = 2'-O-methoxyethyl thymidine
  modified_base 19: mod_base = OTHER; note = 2'-O-methoxyethyl guanosine
  modified_base 20: mod_base = OTHER; note = 2'-O-methoxyethyl 5-methylcytidine
  misc_feature 1..5: note = RNA
  misc_feature 6..9: note = DNA
  misc_feature 10: note = RNA
  misc_feature 11..14: note = DNA
  misc_feature 15..20: note = RNA
gcagaggtgaagcgaagtgc

SEQ ID NO: 63 - DNA, 20 bp, synthetic construct
  source 1..20: mol_type = other DNA
  modified_base 1: mod_base = OTHER; note = 2'-O-methoxyethyl guanosine
  modified_base 2: mod_base = OTHER; note = 2'-O-methoxyethyl 5-methylcytidine
  modified_base 3: mod_base = OTHER; note = 2'-O-methoxyethyl adenosine
  modified_base 4: mod_base = OTHER; note = 2'-O-methoxyethyl guanosine
  modified_base 5: mod_base = OTHER; note = 2'-O-methoxyethyl adenosine
  modified_base 9: mod_base = OTHER; note = 2'-O-methoxyethyl guanosine
  modified_base 11: mod_base = OTHER; note = 2'-O-methoxyethyl adenosine
  modified_base 13: mod_base = OTHER; note = 2'-deoxy 5-methylcytidine
  modified_base 16: mod_base = OTHER; note = 2'-O-methoxyethyl adenosine
  modified_base 17: mod_base = OTHER; note = 2'-O-methoxyethyl guanosine
  modified_base 18: mod_base = OTHER; note = 2'-O-methoxyethyl thymidine
  modified_base 19: mod_base = OTHER; note = 2'-O-methoxyethyl guanosine
  modified_base 20: mod_base = OTHER; note = 2'-O-methoxyethyl 5-methylcytidine
  misc_feature 1..5: note = RNA
  misc_feature 6..8: note = DNA
  misc_feature 9: note = RNA
  misc_feature 10: note = DNA
  misc_feature 11: note = RNA
  misc_feature 12..15: note = DNA
  misc_feature 16..20: note = RNA
gcagaggtgaagcgaagtgc

SEQ ID NO: 64 - DNA, 20 bp, synthetic construct
  source 1..20: mol_type = other DNA
  modified_base 1: mod_base = OTHER; note = 2'-O-methoxyethyl guanosine
  modified_base 2: mod_base = OTHER; note = 2'-O-methoxyethyl 5-methylcytidine
  modified_base 3: mod_base = OTHER; note = 2'-O-methoxyethyl adenosine
  modified_base 4: mod_base = OTHER; note = 2'-O-methoxyethyl guanosine
  modified_base 5: mod_base = OTHER; note = 2'-O-methoxyethyl adenosine
  modified_base 8: mod_base = OTHER; note = 2'-O-methoxyethyl thymidine
  modified_base 11: mod_base = OTHER; note = 2'-O-methoxyethyl adenosine
  modified_base 13: mod_base = OTHER; note = 2'-deoxy 5-methylcytidine
  modified_base 16: mod_base = OTHER; note = 2'-O-methoxyethyl adenosine
  modified_base 17: mod_base = OTHER; note = 2'-O-methoxyethyl guanosine
  modified_base 18: mod_base = OTHER; note = 2'-O-methoxyethyl thymidine
  modified_base 19: mod_base = OTHER; note = 2'-O-methoxyethyl guanosine
  modified_base 20: mod_base = OTHER; note = 2'-O-methoxyethyl 5-methylcytidine
  misc_feature 1..5: note = RNA
  misc_feature 6..7: note = DNA
  misc_feature 8: note = RNA
  misc_feature 9..10: note = DNA
  misc_feature 11: note = RNA
  misc_feature 12..15: note = DNA
  misc_feature 16..20: note = RNA
gcagaggtgaagcgaagtgc

SEQ ID NO: 65 - DNA, 20 bp, synthetic construct
  source 1..20: mol_type = other DNA
  modified_base 1: mod_base = OTHER; note = 2'-O-methoxyethyl guanosine
  modified_base 2: mod_base = OTHER; note = 2'-O-methoxyethyl 5-methylcytidine
  modified_base 3: mod_base = OTHER; note = 2'-O-methoxyethyl adenosine
  modified_base 4: mod_base = OTHER; note = 2'-O-methoxyethyl guanosine
  modified_base 5: mod_base = OTHER; note = 2'-O-methoxyethyl adenosine
  modified_base 7: mod_base = OTHER; note = 2'-O-methoxyethyl guanosine
  modified_base 11: mod_base = OTHER; note = 2'-O-methoxyethyl adenosine
  modified_base 13: mod_base = OTHER; note = 2'-deoxy 5-methylcytidine
  modified_base 16: mod_base = OTHER; note = 2'-O-methoxyethyl adenosine
  modified_base 17: mod_base = OTHER; note = 2'-O-methoxyethyl guanosine
  modified_base 18: mod_base = OTHER; note = 2'-O-methoxyethyl thymidine
  modified_base 19: mod_base = OTHER; note = 2'-O-methoxyethyl guanosine
  modified_base 20: mod_base = OTHER; note = 2'-O-methoxyethyl 5-methylcytidine
  misc_feature 1..5: note = RNA
  misc_feature 6: note = DNA
  misc_feature 7: note = RNA
  misc_feature 8..10: note = DNA
  misc_feature 11: note = RNA
  misc_feature 12..15: note = DNA
  misc_feature 16..20: note = RNA
gcagaggtgaagcgaagtgc

SEQ ID NO: 66 - DNA, 20 bp, synthetic construct
  source 1..20: mol_type = other DNA
  modified_base 1: mod_base = OTHER; note = 2'-O-methoxyethyl guanosine
  modified_base 2: mod_base = OTHER; note = 2'-O-methoxyethyl 5-methylcytidine
  modified_base 3: mod_base = OTHER; note = 2'-O-methoxyethyl adenosine
  modified_base 4: mod_base = OTHER; note = 2'-O-methoxyethyl guanosine
  modified_base 5: mod_base = OTHER; note = 2'-O-methoxyethyl adenosine
  modified_base 6: mod_base = OTHER; note = 2'-O-methoxyethyl guanosine
  modified_base 11: mod_base = OTHER; note = 2'-O-methoxyethyl adenosine
  modified_base 13: mod_base = OTHER; note = 2'-deoxy 5-methylcytidine
  modified_base 16: mod_base = OTHER; note = 2'-O-methoxyethyl adenosine
  modified_base 17: mod_base = OTHER; note = 2'-O-methoxyethyl guanosine
  modified_base 18: mod_base = OTHER; note = 2'-O-methoxyethyl thymidine
  modified_base 19: mod_base = OTHER; note = 2'-O-methoxyethyl guanosine
  modified_base 20: mod_base = OTHER; note = 2'-O-methoxyethyl 5-methylcytidine
  misc_feature 1..6: note = RNA
  misc_feature 7..10: note = DNA
  misc_feature 11: note = RNA
  misc_feature 12..15: note = DNA
  misc_feature 16..20: note = RNA
gcagaggtgaagcgaagtgc

SEQ ID NO: 67 - DNA, 20 bp, synthetic construct
  source 1..20: mol_type = other DNA
  modified_base 1: mod_base = OTHER; note = 2'-O-methoxyethyl guanosine
  modified_base 2: mod_base = OTHER; note = 2'-O-methoxyethyl 5-methylcytidine
  modified_base 3: mod_base = OTHER; note = 2'-O-methoxyethyl adenosine
  modified_base 4: mod_base = OTHER; note = 2'-O-methoxyethyl guanosine
  modified_base 5: mod_base = OTHER; note = 2'-O-methoxyethyl adenosine
  modified_base 7: mod_base = OTHER; note = 2'-O-methoxyethyl guanosine
  modified_base 10: mod_base = OTHER; note = 2'-O-methoxyethyl adenosine
  modified_base 13: mod_base = OTHER; note = 2'-O-methoxyethyl 5-methylcytidine
  modified_base 16: mod_base = OTHER; note = 2'-O-methoxyethyl adenosine
  modified_base 17: mod_base = OTHER; note = 2'-O-methoxyethyl guanosine
  modified_base 18: mod_base = OTHER; note = 2'-O-methoxyethyl thymidine
  modified_base 19: mod_base = OTHER; note = 2'-O-methoxyethyl guanosine
  modified_base 20: mod_base = OTHER; note = 2'-O-methoxyethyl 5-methylcytidine
  misc_feature 1..5: note = RNA
  misc_feature 6: note = DNA
  misc_feature 7: note = RNA
  misc_feature 8..9: note = DNA
  misc_feature 10: note = RNA
  misc_feature 11..12: note = DNA
  misc_feature 13: note = RNA
  misc_feature 14..15: note = DNA
  misc_feature 16..20: note = RNA
gcagaggtgaagcgaagtgc

SEQ ID NO: 68 - DNA, 20 bp, synthetic construct
  source 1..20: mol_type = other DNA
  modified_base 1: mod_base = OTHER; note = 2'-O-methoxyethyl guanosine
  modified_base 2: mod_base = OTHER; note = 2'-O-methoxyethyl 5-methylcytidine
  modified_base 3: mod_base = OTHER; note = 2'-O-methoxyethyl adenosine
  modified_base 4: mod_base = OTHER; note = 2'-O-methoxyethyl guanosine
  modified_base 5: mod_base = OTHER; note = 2'-O-methoxyethyl adenosine
  modified_base 8: mod_base = OTHER; note = 2'-O-methoxyethyl thymidine
  modified_base 11: mod_base = OTHER; note = 2'-O-methoxyethyl adenosine
  modified_base 13: mod_base = OTHER; note = 2'-deoxy 5-methylcytidine
  modified_base 14: mod_base = OTHER; note = 2'-O-methoxyethyl guanosine
  modified_base 16: mod_base = OTHER; note = 2'-O-methoxyethyl adenosine
  modified_base 17: mod_base = OTHER; note = 2'-O-methoxyethyl guanosine
  modified_base 18: mod_base = OTHER; note = 2'-O-methoxyethyl thymidine
  modified_base 19: mod_base = OTHER; note = 2'-O-methoxyethyl guanosine
  modified_base 20: mod_base = OTHER; note = 2'-O-methoxyethyl 5-methylcytidine
  misc_feature 1..5: note = RNA
  misc_feature 6..7: note = DNA
  misc_feature 8: note = RNA
  misc_feature 9..10: note = DNA
  misc_feature 11: note = RNA
  misc_feature 12..13: note = DNA
  misc_feature 14: note = RNA
  misc_feature 15: note = DNA
  misc_feature 16..20: note = RNA
gcagaggtgaagcgaagtgc

SEQ ID NO: 69 - DNA, 40 bp, synthetic construct
  source 1..40: mol_type = other DNA
  modified_base 1: mod_base = OTHER; note = 2'-O-methoxyethyl guanosine
  modified_base 2: mod_base = OTHER; note = 2'-O-methoxyethyl 5-methylcytidine
  modified_base 3: mod_base = OTHER; note = 2'-O-methoxyethyl adenosine
  modified_base 4: mod_base = OTHER; note = 2'-O-methoxyethyl guanosine
  modified_base 5: mod_base = OTHER; note = 2'-O-methoxyethyl adenosine
  modified_base 10: mod_base = OTHER; note = 2'-O-methoxyethyl adenosine
  modified_base 13: mod_base = OTHER; note = 2'-deoxy 5-methylcytidine
  modified_base 16: mod_base = OTHER; note = 2'-O-methoxyethyl adenosine
  modified_base 17: mod_base = OTHER; note = 2'-O-methoxyethyl guanosine
  modified_base 18: mod_base = OTHER; note = 2'-O-methoxyethyl thymidine
  modified_base 19: mod_base = OTHER; note = 2'-O-methoxyethyl guanosine
  modified_base 20: mod_base = OTHER; note = 2'-O-methoxyethyl 5-methylcytidine
  modified_base 21: mod_base = OTHER; note = 2'-O-methoxyethyl adenosine
  modified_base 22: mod_base = OTHER; note = 2'-O-methoxyethyl adenosine
  modified_base 23: mod_base = OTHER; note = 2'-O-methoxyethyl 5-methylcytidine
  modified_base 24: mod_base = OTHER; note = 2'-O-methoxyethyl adenosine
  modified_base 25: mod_base = OTHER; note = 2'-O-methoxyethyl 5-methylcytidine
  modified_base 26: mod_base = OTHER; note = 2'-O-methoxyethyl adenosine
  modified_base 27: mod_base = OTHER; note = 2'-O-methoxyethyl adenosine
  modified_base 28: mod_base = OTHER; note = 2'-O-methoxyethyl 5-methylcytidine
  modified_base 29: mod_base = OTHER; note = 2'-O-methoxyethyl adenosine
  modified_base 30: mod_base = OTHER; note = 2'-O-methoxyethyl 5-methylcytidine
  modified_base 31: mod_base = OTHER; note = 2'-O-methoxyethyl adenosine
  modified_base 32: mod_base = OTHER; note = 2'-O-methoxyethyl adenosine
  modified_base 33: mod_base = OTHER; note = 2'-O-methoxyethyl 5-methylcytidine
  modified_base 34: mod_base = OTHER; note = 2'-O-methoxyethyl adenosine
  modified_base 35: mod_base = OTHER; note = 2'-O-methoxyethyl 5-methylcytidine
  modified_base 36: mod_base = OTHER; note = 2'-O-methoxyethyl adenosine
  modified_base 37: mod_base = OTHER; note = 2'-O-methoxyethyl adenosine
  modified_base 38: mod_base = OTHER; note = 2'-O-methoxyethyl 5-methylcytidine
  modified_base 39: mod_base = OTHER; note = 2'-O-methoxyethyl adenosine
  modified_base 40: mod_base = OTHER; note = 2'-O-methoxyethyl 5-methylcytidine
  misc_feature 1..5: note = RNA
  misc_feature 6..9: note = DNA
  misc_feature 10: note = RNA
  misc_feature 11..15: note = DNA
  misc_feature 16..40: note = RNA
gcagaggtgaagcgaagtgcaacacaacacaacacaacac

SEQ ID NO: 70 - DNA, 40 bp, synthetic construct; identical to SEQ ID NO: 69
  source 1..40: mol_type = other DNA
  modified_base 1: mod_base = OTHER; note = 2'-O-methoxyethyl guanosine
  modified_base 2: mod_base = OTHER; note = 2'-O-methoxyethyl 5-methylcytidine
  modified_base 3: mod_base = OTHER; note = 2'-O-methoxyethyl adenosine
  modified_base 4: mod_base = OTHER; note = 2'-O-methoxyethyl guanosine
  modified_base 5: mod_base = OTHER; note = 2'-O-methoxyethyl adenosine
  modified_base 11: mod_base = OTHER; note = 2'-O-methoxyethyl adenosine
  modified_base 13: mod_base = OTHER; note = 2'-deoxy 5-methylcytidine
  modified_base 16: mod_base = OTHER; note = 2'-O-methoxyethyl adenosine
  modified_base 17: mod_base = OTHER; note = 2'-O-methoxyethyl guanosine
  modified_base 18: mod_base = OTHER; note = 2'-O-methoxyethyl thymidine
  modified_base 19: mod_base = OTHER; note = 2'-O-methoxyethyl guanosine
  modified_base 20: mod_base = OTHER; note = 2'-O-methoxyethyl 5-methylcytidine
  modified_base 21: mod_base = OTHER; note = 2'-O-methoxyethyl adenosine
  modified_base 22: mod_base = OTHER; note = 2'-O-methoxyethyl adenosine
  modified_base 23: mod_base = OTHER; note = 2'-O-methoxyethyl 5-methylcytidine
  modified_base 24: mod_base = OTHER; note = 2'-O-methoxyethyl adenosine
  modified_base 25: mod_base = OTHER; note = 2'-O-methoxyethyl 5-methylcytidine
  modified_base 26: mod_base = OTHER; note = 2'-O-methoxyethyl adenosine
  modified_base 27: mod_base = OTHER; note = 2'-O-methoxyethyl adenosine
  modified_base 28: mod_base = OTHER; note = 2'-O-methoxyethyl 5-methylcytidine
  modified_base 29: mod_base = OTHER; note = 2'-O-methoxyethyl adenosine
  modified_base 30: mod_base = OTHER; note = 2'-O-methoxyethyl 5-methylcytidine
  modified_base 31: mod_base = OTHER; note = 2'-O-methoxyethyl adenosine
  modified_base 32: mod_base = OTHER; note = 2'-O-methoxyethyl adenosine
  modified_base 33: mod_base = OTHER; note = 2'-O-methoxyethyl 5-methylcytidine
  modified_base 34: mod_base = OTHER; note = 2'-O-methoxyethyl adenosine
  modified_base 35: mod_base = OTHER; note = 2'-O-methoxyethyl 5-methylcytidine
  modified_base 36: mod_base = OTHER; note = 2'-O-methoxyethyl adenosine
  modified_base 37: mod_base = OTHER; note = 2'-O-methoxyethyl adenosine
  modified_base 38: mod_base = OTHER; note = 2'-O-methoxyethyl 5-methylcytidine
  modified_base 39: mod_base = OTHER; note = 2'-O-methoxyethyl adenosine
  modified_base 40: mod_base = OTHER; note = 2'-O-methoxyethyl 5-methylcytidine
  misc_feature 1..5: note = RNA
  misc_feature 6..10: note = DNA
  misc_feature 11: note = RNA
  misc_feature 12..15: note = DNA
  misc_feature 16..40: note = RNA

SEQ ID NO: 71 - DNA, 20 bp, synthetic construct
  source 1..20: mol_type = other DNA
  modified_base 1: mod_base = OTHER; note = 2'-O-methoxyethyl guanosine
  modified_base 2: mod_base = OTHER; note = 2'-O-methoxyethyl 5-methylcytidine
  modified_base 3: mod_base = OTHER; note = 2'-O-methoxyethyl adenosine
  modified_base 4: mod_base = OTHER; note = 2'-O-methoxyethyl guanosine
  modified_base 5: mod_base = OTHER; note = 2'-O-methoxyethyl adenosine
  modified_base 6: mod_base = OTHER; note = 2'fluoro 2'-deoxy guanosine
  modified_base 13: mod_base = OTHER; note = 2'-deoxy 5-methylcytidine
  modified_base 14: mod_base = OTHER; note = 2'fluoro 2'-deoxy guanosine
  modified_base 16: mod_base = OTHER; note = 2'-O-methoxyethyl adenosine
  modified_base 17: mod_base = OTHER; note = 2'-O-methoxyethyl guanosine
  modified_base 18: mod_base = OTHER; note = 2'-O-methoxyethyl thymidine
  modified_base 19: mod_base = OTHER; note = 2'-O-methoxyethyl guanosine
  modified_base 20: mod_base = OTHER; note = 2'-O-methoxyethyl 5-methylcytidine
  misc_feature 1..6: note = RNA
  misc_feature 7..13: note = DNA
  misc_feature 14: note = RNA
  misc_feature 15: note = DNA
  misc_feature 16..20: note = RNA
gcagaggtgaagcgaagtgc

SEQ ID NO: 72 - DNA, 20 bp, synthetic construct
  source 1..20: mol_type = other DNA
  modified_base 1: mod_base = OTHER; note = 2'-O-methoxyethyl guanosine
  modified_base 2: mod_base = OTHER; note = 2'-O-methoxyethyl 5-methylcytidine
  modified_base 3: mod_base = OTHER; note = 2'-O-methoxyethyl adenosine
  modified_base 4: mod_base = OTHER; note = 2'-O-methoxyethyl guanosine
  modified_base 5: mod_base = OTHER; note = 2'-O-methoxyethyl adenosine
  modified_base 9: mod_base = OTHER; note = 2'fluoro 2'-deoxy guanosine
  modified_base 13: mod_base = OTHER; note = 2'-deoxy 5-methylcytidine
  modified_base 14: mod_base = OTHER; note = 2'fluoro 2'-deoxy guanosine
  modified_base 16: mod_base = OTHER; note = 2'-O-methoxyethyl adenosine
  modified_base 17: mod_base = OTHER; note = 2'-O-methoxyethyl guanosine
  modified_base 18: mod_base = OTHER; note = 2'-O-methoxyethyl thymidine
  modified_base 19: mod_base = OTHER; note = 2'-O-methoxyethyl guanosine
  modified_base 20: mod_base = OTHER; note = 2'-O-methoxyethyl 5-methylcytidine
  misc_feature 1..5: note = RNA
  misc_feature 6..8: note = DNA
  misc_feature 9: note = RNA
  misc_feature 10..13: note = DNA
  misc_feature 14: note = RNA
  misc_feature 15: note = DNA
  misc_feature 16..20: note = RNA
gcagaggtgaagcgaagtgc

SEQ ID NO: 73 - DNA, 20 bp, synthetic construct
  source 1..20: mol_type = other DNA
  modified_base 1: mod_base = OTHER; note = 2'-O-methoxyethyl guanosine
  modified_base 2: mod_base = OTHER; note = 2'-O-methoxyethyl thymidine
  modified_base 3: mod_base = OTHER; note = 2'-O-methoxyethyl guanosine
  modified_base 4: mod_base = OTHER; note = 2'-O-methoxyethyl adenosine
  modified_base 5: mod_base = OTHER; note = 2'-O-methoxyethyl adenosine
  modified_base 6: mod_base = OTHER; note = 2'-O-methoxyethyl guanosine
  modified_base 7: mod_base = OTHER; note = 2'-deoxy 5-methylcytidine
  modified_base 14: mod_base = OTHER; note = 2'-deoxy 5-methylcytidine
  modified_base 16: mod_base = OTHER; note = 2'-O-methoxyethyl 5-methylcytidine
  modified_base 17: mod_base = OTHER; note = 2'-O-methoxyethyl adenosine
  modified_base 18: mod_base = OTHER; note = 2'-O-methoxyethyl 5-methylcytidine
  modified_base 19: mod_base = OTHER; note = 2'-O-methoxyethyl guanosine
  modified_base 20: mod_base = OTHER; note = 2'-O-methoxyethyl guanosine
  misc_feature 1..6: note = RNA
  misc_feature 7..15: note = DNA
  misc_feature 16..20: note = RNA
gtgaagcgaagtgcacacgg

SEQ ID NO: 74 - DNA, 20 bp, synthetic construct
  source 1..20: mol_type = other DNA
  modified_base 1: mod_base = OTHER; note = 2'-O-methoxyethyl guanosine
  modified_base 2: mod_base = OTHER; note = 2'-O-methoxyethyl thymidine
  modified_base 3: mod_base = OTHER; note = 2'-O-methoxyethyl guanosine
  modified_base 4: mod_base = OTHER; note = 2'-O-methoxyethyl adenosine
  modified_base 5: mod_base = OTHER; note = 2'-O-methoxyethyl adenosine
  modified_base 7: mod_base = OTHER; note = 2'-O-methoxyethyl 5-methylcytidine
  modified_base 14: mod_base = OTHER; note = 2'-deoxy 5-methylcytidine
  modified_base 16: mod_base = OTHER; note = 2'-O-methoxyethyl 5-methylcytidine
  modified_base 17: mod_base = OTHER; note = 2'-O-methoxyethyl adenosine
  modified_base 18: mod_base = OTHER; note = 2'-O-methoxyethyl 5-methylcytidine
  modified_base 19: mod_base = OTHER; note = 2'-O-methoxyethyl guanosine
  modified_base 20: mod_base = OTHER; note = 2'-O-methoxyethyl guanosine
  misc_feature 1..5: note = RNA
  misc_feature 6: note = DNA
  misc_feature 7: note = RNA
  misc_feature 8..15: note = DNA
  misc_feature 16..20: note = RNA
gtgaagcgaagtgcacacgg

SEQ ID NO: 75 - DNA, 20 bp, synthetic construct
  source 1..20: mol_type = other DNA
  modified_base 1: mod_base = OTHER; note = 2'-O-methoxyethyl guanosine
  modified_base 2: mod_base = OTHER; note = 2'-O-methoxyethyl thymidine
  modified_base 3: mod_base = OTHER; note = 2'-O-methoxyethyl guanosine
  modified_base 4: mod_base = OTHER; note = 2'-O-methoxyethyl adenosine
  modified_base 5: mod_base = OTHER; note = 2'-O-methoxyethyl adenosine
  modified_base 7: mod_base = OTHER; note = 2'-deoxy 5-methylcytidine
  modified_base 8: mod_base = OTHER; note = 2'-O-methoxyethyl guanosine
  modified_base 14: mod_base = OTHER; note = 2'-deoxy 5-methylcytidine
  modified_base 16: mod_base = OTHER; note = 2'-O-methoxyethyl 5-methylcytidine
  modified_base 17: mod_base = OTHER; note = 2'-O-methoxyethyl adenosine
  modified_base 18: mod_base = OTHER; note = 2'-O-methoxyethyl 5-methylcytidine
  modified_base 19: mod_base = OTHER; note = 2'-O-methoxyethyl guanosine
  modified_base 20: mod_base = OTHER; note = 2'-O-methoxyethyl guanosine
  misc_feature 1..5: note = RNA
  misc_feature 6..7: note = DNA
  misc_feature 8: note = RNA
  misc_feature 9..15: note = DNA
  misc_feature 16..20: note = RNA
gtgaagcgaagtgcacacgg

SEQ ID NO: 76 - DNA, 20 bp, synthetic construct
  source 1..20: mol_type = other DNA
  modified_base 1: mod_base = OTHER; note = 2'-O-methoxyethyl guanosine
  modified_base 2: mod_base = OTHER; note = 2'-O-methoxyethyl thymidine
  modified_base 3: mod_base = OTHER; note = 2'-O-methoxyethyl guanosine
  modified_base 4: mod_base = OTHER; note = 2'-O-methoxyethyl adenosine
  modified_base 5: mod_base = OTHER; note = 2'-O-methoxyethyl adenosine
  modified_base 7: mod_base = OTHER; note = 2'-deoxy 5-methylcytidine
  modified_base 9: mod_base = OTHER; note = 2'-O-methoxyethyl adenosine
  modified_base 14: mod_base = OTHER; note = 2'-deoxy 5-methylcytidine
  modified_base 16: mod_base = OTHER; note = 2'-O-methoxyethyl 5-methylcytidine
  modified_base 17: mod_base = OTHER; note = 2'-O-methoxyethyl adenosine
  modified_base 18: mod_base = OTHER; note = 2'-O-methoxyethyl 5-methylcytidine
  modified_base 19: mod_base = OTHER; note = 2'-O-methoxyethyl guanosine
  modified_base 20: mod_base = OTHER; note = 2'-O-methoxyethyl guanosine
  misc_feature 1..5: note = RNA
  misc_feature 6..8: note = DNA
  misc_feature 9: note = RNA
  misc_feature 10..15: note = DNA
  misc_feature 16..20: note = RNA
gtgaagcgaagtgcacacgg

SEQ ID NO: 77 - DNA, 20 bp, synthetic construct
  source 1..20: mol_type = other DNA
  modified_base 1: mod_base = OTHER; note = 2'-O-methoxyethyl guanosine
  modified_base 2: mod_base = OTHER; note = 2'-O-methoxyethyl thymidine
  modified_base 3: mod_base = OTHER; note = 2'-O-methoxyethyl guanosine
  modified_base 4: mod_base = OTHER; note = 2'-O-methoxyethyl adenosine
  modified_base 5: mod_base = OTHER; note = 2'-O-methoxyethyl adenosine
  modified_base 7: mod_base = OTHER; note = 2'-deoxy 5-methylcytidine
  modified_base 10: mod_base = OTHER; note = 2'-O-methoxyethyl adenosine
  modified_base 14: mod_base = OTHER; note = 2'-deoxy 5-methylcytidine
  modified_base 16: mod_base = OTHER; note = 2'-O-methoxyethyl 5-methylcytidine
  modified_base 17: mod_base = OTHER; note = 2'-O-methoxyethyl adenosine
  modified_base 18: mod_base = OTHER; note = 2'-O-methoxyethyl 5-methylcytidine
  modified_base 19: mod_base = OTHER; note = 2'-O-methoxyethyl guanosine
  modified_base 20: mod_base = OTHER; note = 2'-O-methoxyethyl guanosine
  misc_feature 1..5: note = RNA
  misc_feature 6..9: note = DNA
  misc_feature 10: note = RNA
  misc_feature 11..15: note = DNA
  misc_feature 16..20: note = RNA
gtgaagcgaagtgcacacgg

SEQ ID NO: 78 - DNA, 20 bp, synthetic construct
  source 1..20: mol_type = other DNA
  modified_base 1: mod_base = OTHER; note = 2'-O-methoxyethyl guanosine
  modified_base 2: mod_base = OTHER; note = 2'-O-methoxyethyl thymidine
  modified_base 3: mod_base = OTHER; note = 2'-O-methoxyethyl guanosine
  modified_base 4: mod_base = OTHER; note = 2'-O-methoxyethyl adenosine
  modified_base 5: mod_base = OTHER; note = 2'-O-methoxyethyl adenosine
  modified_base 7: mod_base = OTHER; note = 2'-deoxy 5-methylcytidine
  modified_base 11: mod_base = OTHER; note = 2'-O-methoxyethyl guanosine
  modified_base 14: mod_base = OTHER; note = 2'-deoxy 5-methylcytidine
  modified_base 16: mod_base = OTHER; note = 2'-O-methoxyethyl 5-methylcytidine
  modified_base 17: mod_base = OTHER; note = 2'-O-methoxyethyl adenosine
  modified_base 18: mod_base = OTHER; note = 2'-O-methoxyethyl 5-methylcytidine
  modified_base 19: mod_base = OTHER; note = 2'-O-methoxyethyl guanosine
  modified_base 20: mod_base = OTHER; note = 2'-O-methoxyethyl guanosine
  misc_feature 1..5: note = RNA
  misc_feature 6..10: note = DNA
  misc_feature 11: note = RNA
  misc_feature 12..15: note = DNA
  misc_feature 16..20: note = RNA
gtgaagcgaagtgcacacgg

SEQ ID NO: 79 - DNA, 20 bp, synthetic construct
  source 1..20: mol_type = other DNA
  modified_base 1: mod_base = OTHER; note = 2'-O-methoxyethyl guanosine
  modified_base 2: mod_base = OTHER; note = 2'-O-methoxyethyl thymidine
  modified_base 3: mod_base = OTHER; note = 2'-O-methoxyethyl guanosine
  modified_base 4: mod_base = OTHER; note = 2'-O-methoxyethyl adenosine
  modified_base 5: mod_base = OTHER; note = 2'-O-methoxyethyl adenosine
  modified_base 7: mod_base = OTHER; note = 2'-deoxy 5-methylcytidine
  modified_base 12: mod_base = OTHER; note = 2'-O-methoxyethyl thymidine
  modified_base 14: mod_base = OTHER; note = 2'-deoxy 5-methylcytidine
  modified_base 16: mod_base = OTHER; note = 2'-O-methoxyethyl 5-methylcytidine
  modified_base 17: mod_base = OTHER; note = 2'-O-methoxyethyl adenosine
  modified_base 18: mod_base = OTHER; note = 2'-O-methoxyethyl 5-methylcytidine
  modified_base 19: mod_base = OTHER; note = 2'-O-methoxyethyl guanosine
  modified_base 20: mod_base = OTHER; note = 2'-O-methoxyethyl guanosine
  misc_feature 1..5: note = RNA
  misc_feature 6..11: note = DNA
  misc_feature 12: note = RNA
  misc_feature 13..15: note = DNA
  misc_feature 16..20: note = RNA
gtgaagcgaagtgcacacgg

SEQ ID NO: 80 - DNA, 20 bp, synthetic construct
  source 1..20: mol_type = other DNA
  modified_base 1: mod_base = OTHER; note = 2'-O-methoxyethyl guanosine
  modified_base 2: mod_base = OTHER; note = 2'-O-methoxyethyl thymidine
  modified_base 3: mod_base = OTHER; note = 2'-O-methoxyethyl guanosine
  modified_base 4: mod_base = OTHER; note = 2'-O-methoxyethyl adenosine
  modified_base 5: mod_base = OTHER; note = 2'-O-methoxyethyl adenosine
  modified_base 7: mod_base = OTHER; note = 2'-deoxy 5-methylcytidine
  modified_base 13: mod_base = OTHER; note = 2'-O-methoxyethyl guanosine
  modified_base 14: mod_base = OTHER; note = 2'-deoxy 5-methylcytidine
  modified_base 16: mod_base = OTHER; note = 2'-O-methoxyethyl 5-methylcytidine
  modified_base 17: mod_base = OTHER; note = 2'-O-methoxyethyl adenosine
  modified_base 18: mod_base = OTHER; note = 2'-O-methoxyethyl 5-methylcytidine
  modified_base 19: mod_base = OTHER; note = 2'-O-methoxyethyl guanosine
  modified_base 20: mod_base = OTHER; note = 2'-O-methoxyethyl guanosine
  misc_feature 1..5: note = RNA
  misc_feature 6..12: note = DNA
  misc_feature 13: note = RNA
  misc_feature 14..15: note = DNA
  misc_feature 16..20: note = RNA
gtgaagcgaagtgcacacgg

SEQ ID NO: 81 - DNA, 20 bp, synthetic construct
  source 1..20: mol_type = other DNA
  modified_base 1: mod_base = OTHER; note = 2'-O-methoxyethyl guanosine
  modified_base 2: mod_base = OTHER; note = 2'-O-methoxyethyl thymidine
  modified_base 3: mod_base = OTHER; note = 2'-O-methoxyethyl guanosine
  modified_base 4: mod_base = OTHER; note = 2'-O-methoxyethyl adenosine
  modified_base 5: mod_base = OTHER; note = 2'-O-methoxyethyl adenosine
  modified_base 7: mod_base = OTHER; note = 2'-deoxy 5-methylcytidine
  modified_base 14: mod_base = OTHER; note = 2'-O-methoxyethyl 5-methylcytidine
  modified_base 16: mod_base = OTHER; note = 2'-O-methoxyethyl 5-methylcytidine
  modified_base 17: mod_base = OTHER; note = 2'-O-methoxyethyl adenosine
  modified_base 18: mod_base = OTHER; note = 2'-O-methoxyethyl 5-methylcytidine
  modified_base 19: mod_base = OTHER; note = 2'-O-methoxyethyl guanosine
  modified_base 20: mod_base = OTHER; note = 2'-O-methoxyethyl guanosine
  misc_feature 1..5: note = RNA
  misc_feature 6..13: note = DNA
  misc_feature 14: note = RNA
  misc_feature 15: note = DNA
  misc_feature 16..20: note = RNA
gtgaagcgaagtgcacacgg

SEQ ID NO: 82 - DNA, 20 bp, synthetic construct
  source 1..20: mol_type = other DNA
  modified_base 1: mod_base = OTHER; note = 2'-O-methoxyethyl guanosine
  modified_base 2: mod_base = OTHER; note = 2'-O-methoxyethyl thymidine
  modified_base 3: mod_base = OTHER; note = 2'-O-methoxyethyl guanosine
  modified_base 4: mod_base = OTHER; note = 2'-O-methoxyethyl adenosine
  modified_base 5: mod_base = OTHER; note = 2'-O-methoxyethyl adenosine
  modified_base 7: mod_base = OTHER; note = 2'-deoxy 5-methylcytidine
  modified_base 14: mod_base = OTHER; note = 2'-deoxy 5-methylcytidine
  modified_base 15: mod_base = OTHER; note = 2'-O-methoxyethyl adenosine
  modified_base 16: mod_base = OTHER; note = 2'-O-methoxyethyl 5-methylcytidine
  modified_base 17: mod_base = OTHER; note = 2'-O-methoxyethyl adenosine
  modified_base 18: mod_base = OTHER; note = 2'-O-methoxyethyl 5-methylcytidine
  modified_base 19: mod_base = OTHER; note = 2'-O-methoxyethyl guanosine
  modified_base 20: mod_base = OTHER; note = 2'-O-methoxyethyl guanosine
  misc_feature 1..5: note = RNA
  misc_feature 6..14: note = DNA
  misc_feature 15..20: note = RNA
gtgaagcgaagtgcacacgg

SEQ ID NO: 83 - DNA, 20 bp, synthetic construct
  source 1..20: mol_type = other DNA
  modified_base 1: mod_base = OTHER; note = 2'-O-methoxyethyl guanosine
  modified_base 2: mod_base = OTHER; note = 2'-O-methoxyethyl thymidine
  modified_base 3: mod_base = OTHER; note = 2'-O-methoxyethyl guanosine
  modified_base 4: mod_base = OTHER; note = 2'-O-methoxyethyl adenosine
  modified_base 5: mod_base = OTHER; note = 2'-O-methoxyethyl adenosine
  modified_base 7: mod_base = OTHER; note = 2'-deoxy 5-methylcytidine
  modified_base 10: mod_base = OTHER; note = 2'-O-methoxyethyl adenosine
  modified_base 11: mod_base = OTHER; note = 2'-O-methoxyethyl guanosine
  modified_base 14: mod_base = OTHER; note = 2'-deoxy 5-methylcytidine
  modified_base 16: mod_base = OTHER; note = 2'-O-methoxyethyl 5-methylcytidine
  modified_base 17: mod_base = OTHER; note = 2'-O-methoxyethyl adenosine
  modified_base 18: mod_base = OTHER; note = 2'-O-methoxyethyl 5-methylcytidine
  modified_base 19: mod_base = OTHER; note = 2'-O-methoxyethyl guanosine
  modified_base 20: mod_base = OTHER; note = 2'-O-methoxyethyl guanosine
  misc_feature 1..5: note = RNA
  misc_feature 6..9: note = DNA
  misc_feature 10..11: note = RNA
  misc_feature 12..15: note = DNA
  misc_feature 16..20: note = RNA
gtgaagcgaagtgcacacgg

SEQ ID NO: 84 - DNA, 20 bp, synthetic construct
  source 1..20: mol_type = other DNA
  modified_base 1: mod_base = OTHER; note = 2'-O-methoxyethyl guanosine
  modified_base 2: mod_base = OTHER; note = 2'-O-methoxyethyl thymidine
  modified_base 3: mod_base = OTHER; note = 2'-O-methoxyethyl guanosine
  modified_base 4: mod_base = OTHER; note = 2'-O-methoxyethyl adenosine
  modified_base 5: mod_base = OTHER; note = 2'-O-methoxyethyl adenosine
  modified_base 7: mod_base = OTHER; note = 2'-deoxy 5-methylcytidine
  modified_base 10: mod_base = OTHER; note = 2'-O-methoxyethyl adenosine
  modified_base 12: mod_base = OTHER; note = 2'-O-methoxyethyl thymidine
  modified_base 14: mod_base = OTHER; note = 2'-deoxy 5-methylcytidine
  modified_base 16: mod_base = OTHER; note = 2'-O-methoxyethyl 5-methylcytidine
  modified_base 17: mod_base = OTHER; note = 2'-O-methoxyethyl adenosine
  modified_base 18: mod_base = OTHER; note = 2'-O-methoxyethyl 5-methylcytidine
  modified_base 19: mod_base = OTHER; note = 2'-O-methoxyethyl guanosine
  modified_base 20: mod_base = OTHER; note = 2'-O-methoxyethyl guanosine
  misc_feature 1..5: note = RNA
  misc_feature 6..9: note = DNA
  misc_feature 10: note = RNA
  misc_feature 11: note = DNA
  misc_feature 12: note = RNA
  misc_feature 13..15: note = DNA
  misc_feature 16..20: note = RNA
gtgaagcgaagtgcacacgg

SEQ ID NO: 85 - DNA, 20 bp, synthetic construct
  source 1..20: mol_type = other DNA
  modified_base 1: mod_base = OTHER; note = 2'-O-methoxyethyl guanosine
  modified_base 2: mod_base = OTHER; note = 2'-O-methoxyethyl thymidine
  modified_base 3: mod_base = OTHER; note = 2'-O-methoxyethyl guanosine
  modified_base 4: mod_base = OTHER; note = 2'-O-methoxyethyl adenosine
  modified_base 5: mod_base = OTHER; note = 2'-O-methoxyethyl adenosine
  modified_base 7: mod_base = OTHER; note = 2'-deoxy 5-methylcytidine
  modified_base 10: mod_base = OTHER; note = 2'-O-methoxyethyl adenosine
  modified_base 13: mod_base = OTHER; note = 2'-O-methoxyethyl guanosine
  modified_base 14: mod_base = OTHER; note = 2'-deoxy 5-methylcytidine
  modified_base 16: mod_base = OTHER; note = 2'-O-methoxyethyl 5-methylcytidine
  modified_base 17: mod_base = OTHER; note = 2'-O-methoxyethyl adenosine
  modified_base 18: mod_base = OTHER; note = 2'-O-methoxyethyl 5-methylcytidine
  modified_base 19: mod_base = OTHER; note = 2'-O-methoxyethyl guanosine
  modified_base 20: mod_base = OTHER; note = 2'-O-methoxyethyl guanosine
  misc_feature 1..5: note = RNA
  misc_feature 6..9: note = DNA
  misc_feature 10: note = RNA
  misc_feature 11..12: note = DNA
  misc_feature 13: note = RNA
  misc_feature 14..15: note = DNA
  misc_feature 16..20: note = RNA
gtgaagcgaagtgcacacgg

SEQ ID NO: 86 - DNA, 20 bp, synthetic construct
  source 1..20: mol_type = other DNA
  modified_base 1: mod_base = OTHER; note = 2'-O-methoxyethyl guanosine
  modified_base 2: mod_base = OTHER; note = 2'-O-methoxyethyl thymidine
  modified_base 3: mod_base = OTHER; note = 2'-O-methoxyethyl guanosine
  modified_base 4: mod_base = OTHER; note = 2'-O-methoxyethyl adenosine
  modified_base 5: mod_base = OTHER; note = 2'-O-methoxyethyl adenosine
  modified_base 7: mod_base = OTHER; note = 2'-deoxy 5-methylcytidine
  modified_base 10: mod_base = OTHER; note = 2'-O-methoxyethyl adenosine
  modified_base 14: mod_base = OTHER; note = 2'-O-methoxyethyl 5-methylcytidine
  modified_base 16: mod_base = OTHER; note = 2'-O-methoxyethyl 5-methylcytidine
  modified_base 17: mod_base = OTHER; note = 2'-O-methoxyethyl adenosine
  modified_base 18: mod_base = OTHER; note = 2'-O-methoxyethyl 5-methylcytidine
  modified_base 19: mod_base = OTHER; note = 2'-O-methoxyethyl guanosine
  modified_base 20: mod_base = OTHER; note = 2'-O-methoxyethyl guanosine
  misc_feature 1..5: note = RNA
  misc_feature 6..9: note = DNA
  misc_feature 10: note = RNA
  misc_feature 11..13: note = DNA
  misc_feature 14: note = RNA
  misc_feature 15: note = DNA
  misc_feature 16..20: note = RNA
gtgaagcgaagtgcacacgg

SEQ ID NO: 87 - DNA, 20 bp, synthetic construct
  source 1..20: mol_type = other DNA
  modified_base 1: mod_base = OTHER; note = 2'-O-methoxyethyl guanosine
  modified_base 2: mod_base = OTHER; note = 2'-O-methoxyethyl thymidine
  modified_base 3: mod_base = OTHER; note = 2'-O-methoxyethyl guanosine
  modified_base 4: mod_base = OTHER; note = 2'-O-methoxyethyl adenosine
  modified_base 5: mod_base = OTHER; note = 2'-O-methoxyethyl adenosine
  modified_base 7: mod_base = OTHER; note = 2'-deoxy 5-methylcytidine
  modified_base 10: mod_base = OTHER; note = 2'-O-methoxyethyl adenosine
  modified_base 14: mod_base = OTHER; note = 2'-deoxy 5-methylcytidine
  modified_base 15: mod_base = OTHER; note = 2'-O-methoxyethyl adenosine
  modified_base 16: mod_base = OTHER; note = 2'-O-methoxyethyl 5-methylcytidine
  modified_base 17: mod_base = OTHER; note = 2'-O-methoxyethyl adenosine
  modified_base 18: mod_base = OTHER; note = 2'-O-methoxyethyl 5-methylcytidine
  modified_base 19: mod_base = OTHER; note = 2'-O-methoxyethyl guanosine
  modified_base 20: mod_base = OTHER; note = 2'-O-methoxyethyl guanosine
  misc_feature 1..5: note = RNA
  misc_feature 6..9: note = DNA
  misc_feature 10: note = RNA
  misc_feature 11..14: note = DNA
  misc_feature 15..20: note = RNA
gtgaagcgaagtgcacacgg

SEQ ID NO: 88 - DNA, 20 bp, synthetic construct
  source 1..20: mol_type = other DNA
  modified_base 1: mod_base = OTHER; note = 2'-O-methoxyethyl guanosine
  modified_base 2: mod_base = OTHER; note = 2'-O-methoxyethyl thymidine
  modified_base 3: mod_base = OTHER; note = 2'-O-methoxyethyl guanosine
  modified_base 4: mod_base = OTHER; note = 2'-O-methoxyethyl adenosine
  modified_base 5: mod_base = OTHER; note = 2'-O-methoxyethyl adenosine
  modified_base 7: mod_base = OTHER; note = 2'-deoxy 5-methylcytidine
  modified_base 9: mod_base = OTHER; note = 2'-O-methoxyethyl adenosine
  modified_base 11: mod_base = OTHER; note = 2'-O-methoxyethyl guanosine
  modified_base 14: mod_base = OTHER; note = 2'-deoxy 5-methylcytidine
  modified_base 16: mod_base = OTHER; note = 2'-O-methoxyethyl 5-methylcytidine
  modified_base 17: mod_base = OTHER; note = 2'-O-methoxyethyl adenosine
  modified_base 18: mod_base = OTHER; note = 2'-O-methoxyethyl 5-methylcytidine
  modified_base 19: mod_base = OTHER; note = 2'-O-methoxyethyl guanosine
  modified_base 20: mod_base = OTHER; note = 2'-O-methoxyethyl guanosine
  misc_feature 1..5: note = RNA
  misc_feature 6..8: note = DNA
  misc_feature 9: note = RNA
  misc_feature 10: note = DNA
  misc_feature 11: note = RNA
  misc_feature 12..15: note = DNA
  misc_feature 16..20: note = RNA
gtgaagcgaagtgcacacgg

SEQ ID NO: 89 - DNA, 20 bp, synthetic construct
  source 1..20: mol_type = other DNA
  modified_base 1: mod_base = OTHER; note = 2'-O-methoxyethyl guanosine
  modified_base 2: mod_base = OTHER; note = 2'-O-methoxyethyl thymidine
  modified_base 3: mod_base = OTHER; note = 2'-O-methoxyethyl guanosine
  modified_base 4: mod_base = OTHER; note = 2'-O-methoxyethyl adenosine
  modified_base 5: mod_base = OTHER; note = 2'-O-methoxyethyl adenosine
  modified_base 7: mod_base = OTHER; note = 2'-deoxy 5-methylcytidine
  modified_base 8: mod_base = OTHER; note = 2'-O-methoxyethyl guanosine
  modified_base 11: mod_base = OTHER; note = 2'-O-methoxyethyl guanosine
  modified_base 14: mod_base = OTHER; note = 2'-deoxy 5-methylcytidine
  modified_base 16: mod_base = OTHER; note = 2'-O-methoxyethyl 5-methylcytidine
  modified_base 17: mod_base = OTHER; note = 2'-O-methoxyethyl adenosine
  modified_base 18: mod_base = OTHER; note = 2'-O-methoxyethyl 5-methylcytidine
  modified_base 19: mod_base = OTHER; note = 2'-O-methoxyethyl guanosine
  modified_base 20: mod_base = OTHER; note = 2'-O-methoxyethyl guanosine
  misc_feature 1..5: note = RNA
  misc_feature 6..7: note = DNA
  misc_feature 8: note = RNA
  misc_feature 9..10: note = DNA
  misc_feature 11: note = RNA
  misc_feature 12..15: note = DNA
  misc_feature 16..20: note = RNA
gtgaagcgaagtgcacacgg

SEQ ID NO: 90 - DNA, 20 bp, synthetic construct
  source 1..20: mol_type = other DNA
  modified_base 1: mod_base = OTHER; note = 2'-O-methoxyethyl guanosine
  modified_base 2: mod_base = OTHER; note = 2'-O-methoxyethyl thymidine
  modified_base 3: mod_base = OTHER; note = 2'-O-methoxyethyl guanosine
  modified_base 4: mod_base = OTHER; note = 2'-O-methoxyethyl adenosine
  modified_base 5: mod_base = OTHER; note = 2'-O-methoxyethyl adenosine
  modified_base 7: mod_base = OTHER; note = 2'-O-methoxyethyl 5-methylcytidine
  modified_base 11: mod_base = OTHER; note = 2'-O-methoxyethyl guanosine
  modified_base 14: mod_base = OTHER; note = 2'-deoxy 5-methylcytidine
  modified_base 16: mod_base = OTHER; note = 2'-O-methoxyethyl 5-methylcytidine
  modified_base 17: mod_base = OTHER; note = 2'-O-methoxyethyl adenosine
  modified_base 18: mod_base = OTHER; note = 2'-O-methoxyethyl 5-methylcytidine
  modified_base 19: mod_base = OTHER; note = 2'-O-methoxyethyl guanosine
  modified_base 20: mod_base = OTHER; note = 2'-O-methoxyethyl guanosine
  misc_feature 1..5: note = RNA
  misc_feature 6: note = DNA
  misc_feature 7: note = RNA
  misc_feature 8..10: note = DNA
  misc_feature 11: note = RNA
  misc_feature 12..15: note = DNA
  misc_feature 16..20: note = RNA
gtgaagcgaagtgcacacgg

SEQ ID NO: 91 - DNA, 20 bp, synthetic construct
  source 1..20: mol_type = other DNA
  modified_base 1: mod_base = OTHER; note = 2'-O-methoxyethyl guanosine
  modified_base 2: mod_base = OTHER; note = 2'-O-methoxyethyl thymidine
  modified_base 3: mod_base = OTHER; note = 2'-O-methoxyethyl guanosine
  modified_base 4: mod_base = OTHER; note = 2'-O-methoxyethyl adenosine
  modified_base 5: mod_base = OTHER; note = 2'-O-methoxyethyl adenosine
  modified_base 6: mod_base = OTHER; note = 2'-O-methoxyethyl guanosine
  modified_base 7: mod_base = OTHER; note = 2'-deoxy 5-methylcytidine
  modified_base 11: mod_base = OTHER; note = 2'-O-methoxyethyl guanosine
  modified_base 14: mod_base = OTHER; note = 2'-deoxy 5-methylcytidine
  modified_base 16: mod_base = OTHER; note = 2'-O-methoxyethyl 5-methylcytidine
  modified_base 17: mod_base = OTHER; note = 2'-O-methoxyethyl adenosine
  modified_base 18: mod_base = OTHER; note = 2'-O-methoxyethyl 5-methylcytidine
  modified_base 19: mod_base = OTHER; note = 2'-O-methoxyethyl guanosine
  modified_base 20: mod_base = OTHER; note = 2'-O-methoxyethyl guanosine
  misc_feature 1..6: note = RNA
  misc_feature 7..10: note = DNA
  misc_feature 11: note = RNA
  misc_feature 12..15: note = DNA
  misc_feature 16..20: note = RNA
gtgaagcgaagtgcacacgg

SEQ ID NO: 92 - DNA, 20 bp, synthetic construct
  source 1..20: mol_type = other DNA
  modified_base 1: mod_base = OTHER; note = 2'-O-methoxyethyl guanosine
  modified_base 2: mod_base = OTHER; note = 2'-O-methoxyethyl thymidine
  modified_base 3: mod_base = OTHER; note = 2'-O-methoxyethyl guanosine
  modified_base 4: mod_base = OTHER; note = 2'-O-methoxyethyl adenosine
  modified_base 5: mod_base = OTHER; note = 2'-O-methoxyethyl adenosine
  modified_base 6: mod_base = OTHER; note = 2'-O-methoxyethyl guanosine
  modified_base 7: mod_base = OTHER; note = 2'-deoxy 5-methylcytidine
  modified_base 10: mod_base = OTHER; note = 2'-O-methoxyethyl adenosine
  modified_base 14: mod_base = OTHER; note = 2'-O-methoxyethyl 5-methylcytidine
  modified_base 16: mod_base = OTHER; note = 2'-O-methoxyethyl 5-methylcytidine
  modified_base 17: mod_base = OTHER; note = 2'-O-methoxyethyl adenosine
  modified_base 18: mod_base = OTHER; note = 2'-O-methoxyethyl 5-methylcytidine
  modified_base 19: mod_base = OTHER; note = 2'-O-methoxyethyl guanosine
  modified_base 20: mod_base = OTHER; note = 2'-O-methoxyethyl guanosine
  misc_feature 1..6: note = RNA
  misc_feature 7..9: note = DNA
  misc_feature 10: note = RNA
  misc_feature 11..13: note = DNA
  misc_feature 14: note = RNA
  misc_feature 15: note = DNA
  misc_feature 16..20: note = RNA
gtgaagcgaagtgcacacgg

SEQ ID NO: 93 - DNA, 20 bp, synthetic construct
  source 1..20: mol_type = other DNA
  modified_base 1: mod_base = OTHER; note = 2'-O-methoxyethyl guanosine
  modified_base 2: mod_base = OTHER; note = 2'-O-methoxyethyl thymidine
  modified_base 3: mod_base = OTHER; note = 2'-O-methoxyethyl guanosine
  modified_base 4: mod_base = OTHER; note = 2'-O-methoxyethyl adenosine
  modified_base 5: mod_base = OTHER; note = 2'-O-methoxyethyl adenosine
  modified_base 7: mod_base = OTHER; note = 2'-O-methoxyethyl 5-methylcytidine
  modified_base 11: mod_base = OTHER; note = 2'-O-methoxyethyl guanosine
  modified_base 14: mod_base = OTHER; note = 2'-deoxy 5-methylcytidine
  modified_base 15: mod_base = OTHER; note = 2'-O-methoxyethyl adenosine
  modified_base 16: mod_base = OTHER; note = 2'-O-methoxyethyl 5-methylcytidine
  modified_base 17: mod_base = OTHER; note = 2'-O-methoxyethyl adenosine
  modified_base 18: mod_base = OTHER; note = 2'-O-methoxyethyl 5-methylcytidine
  modified_base 19: mod_base = OTHER; note = 2'-O-methoxyethyl guanosine
  modified_base 20: mod_base = OTHER; note = 2'-O-methoxyethyl guanosine
  misc_feature 1..5: note = RNA
  misc_feature 6: note = DNA
  misc_feature 7: note = RNA
  misc_feature 8..10: note = DNA
  misc_feature 11: note = RNA
  misc_feature 12..14: note = DNA
  misc_feature 15..20: note = RNA
gtgaagcgaagtgcacacgg

SEQ ID NO: 94 - DNA, 20 bp, synthetic construct
  source 1..20: mol_type = other DNA
  modified_base 1: mod_base = OTHER; note = 2'-O-methoxyethyl guanosine
  modified_base 2: mod_base = OTHER; note = 2'-O-methoxyethyl thymidine
  modified_base 3: mod_base = OTHER; note = 2'-O-methoxyethyl guanosine
  modified_base 4: mod_base = OTHER; note = 2'-O-methoxyethyl adenosine
  modified_base 5: mod_base = OTHER; note = 2'-O-methoxyethyl adenosine
  modified_base 7: mod_base = OTHER; note = 2'-O-methoxyethyl 5-methylcytidine
  modified_base 10: mod_base = OTHER; note = 2'-O-methoxyethyl adenosine
  modified_base 13: mod_base = OTHER; note = 2'-O-methoxyethyl guanosine
  modified_base 14: mod_base = OTHER; note = 2'-deoxy 5-methylcytidine
  modified_base 16: mod_base = OTHER; note = 2'-O-methoxyethyl 5-methylcytidine
  modified_base 17: mod_base = OTHER; note = 2'-O-methoxyethyl adenosine
  modified_base 18: mod_base = OTHER; note = 2'-O-methoxyethyl 5-methylcytidine
  modified_base 19: mod_base = OTHER; note = 2'-O-methoxyethyl guanosine
  modified_base 20: mod_base = OTHER; note = 2'-O-methoxyethyl guanosine
  misc_feature 1..5: note = RNA
  misc_feature 6: note = DNA
  misc_feature 7: note = RNA
  misc_feature 8..9: note = DNA
  misc_feature 10: note = RNA
  misc_feature 11..12: note = DNA
  misc_feature 13: note = RNA
  misc_feature 14..15: note = DNA
  misc_feature 16..20: note = RNA
gtgaagcgaagtgcacacgg

SEQ ID NO: 95 - DNA, 20 bp, synthetic construct
  source 1..20: mol_type = other DNA
  modified_base 1: mod_base = OTHER; note = 2'-O-methoxyethyl guanosine
  modified_base 2: mod_base = OTHER; note = 2'-O-methoxyethyl thymidine
  modified_base 3: mod_base = OTHER; note = 2'-O-methoxyethyl guanosine
  modified_base 4: mod_base = OTHER; note = 2'-O-methoxyethyl adenosine
  modified_base 5: mod_base = OTHER; note = 2'-O-methoxyethyl adenosine
  modified_base 7: mod_base = OTHER; note = 2'-deoxy 5-methylcytidine
  modified_base 8: mod_base = OTHER; note = 2'-O-methoxyethyl guanosine
  modified_base 11: mod_base = OTHER; note = 2'-O-methoxyethyl guanosine
  modified_base 14: mod_base = OTHER; note = 2'-O-methoxyethyl 5-methylcytidine
  modified_base 16: mod_base = OTHER; note = 2'-O-methoxyethyl 5-methylcytidine
  modified_base 17: mod_base = OTHER; note = 2'-O-methoxyethyl adenosine
  modified_base 18: mod_base = OTHER; note = 2'-O-methoxyethyl 5-methylcytidine
  modified_base 19: mod_base = OTHER; note = 2'-O-methoxyethyl guanosine
  modified_base 20: mod_base = OTHER; note = 2'-O-methoxyethyl guanosine
  misc_feature 1..5: note = RNA
  misc_feature 6..7: note = DNA
  misc_feature 8: note = RNA
  misc_feature 9..10: note = DNA
  misc_feature 11: note = RNA
  misc_feature 12..13: note = DNA
  misc_feature 14: note = RNA
  misc_feature 15: note = DNA
  misc_feature 16..20: note = RNA
gtgaagcgaagtgcacacgg

SEQ ID NO: 96 - DNA, 20 bp, synthetic construct
  source 1..20: mol_type = other DNA
  modified_base 1: mod_base = OTHER; note = 2'-O-methoxyethyl guanosine
  modified_base 2: mod_base = OTHER; note = 2'-O-methoxyethyl 5-methylcytidine
  modified_base 3: mod_base = OTHER; note = 2'-O-methoxyethyl adenosine
  modified_base 4: mod_base = OTHER; note = 2'-O-methoxyethyl guanosine
  modified_base 5: mod_base = OTHER; note = 2'-O-methoxyethyl adenosine
  modified_base 6: mod_base = OTHER; note = 2'-OH guanosine
  modified_base 13: mod_base = OTHER; note = 2'-deoxy 5-methylcytidine
  modified_base 16: mod_base = OTHER; note = 2'-O-methoxyethyl adenosine
  modified_base 17: mod_base = OTHER; note = 2'-O-methoxyethyl guanosine
  modified_base 18: mod_base = OTHER; note = 2'-O-methoxyethyl thymidine
  modified_base 19: mod_base = OTHER; note = 2'-O-methoxyethyl guanosine
  modified_base 20: mod_base = OTHER; note = 2'-O-methoxyethyl 5-methylcytidine
  misc_feature 1..6: note = RNA
  misc_feature 7..15: note = DNA
  misc_feature 16..20: note = RNA
gcagaggtgaagcgaagtgc

SEQ ID NO: 97 - DNA, 20 bp, synthetic construct
  source 1..20: mol_type = other DNA
  modified_base 1: mod_base = OTHER; note = 2'-O-methoxyethyl guanosine
  modified_base 2: mod_base = OTHER; note = 2'-O-methoxyethyl 5-methylcytidine
  modified_base 3: mod_base = OTHER; note = 2'-O-methoxyethyl adenosine
  modified_base 4: mod_base = OTHER; note = 2'-O-methoxyethyl guanosine
  modified_base 5: mod_base = OTHER; note = 2'-O-methoxyethyl adenosine
  modified_base 7: mod_base = OTHER; note = 2'-OH guanosine
  modified_base 13: mod_base = OTHER; note = 2'-deoxy 5-methylcytidine
  modified_base 16: mod_base = OTHER; note = 2'-O-methoxyethyl adenosine
  modified_base 17: mod_base = OTHER; note = 2'-O-methoxyethyl guanosine
  modified_base 18: mod_base = OTHER; note = 2'-O-methoxyethyl thymidine
  modified_base 19: mod_base = OTHER; note = 2'-O-methoxyethyl guanosine
  modified_base 20: mod_base = OTHER; note = 2'-O-methoxyethyl 5-methylcytidine
  misc_feature 1..5: note = RNA
  misc_feature 6: note = DNA
  misc_feature 7: note = RNA
  misc_feature 8..15: note = DNA
  misc_feature 16..20: note = RNA
gcagaggtgaagcgaagtgc

SEQ ID NO: 98 - DNA, 20 bp, synthetic construct
  source 1..20: mol_type = other DNA
  modified_base 1: mod_base = OTHER; note = 2'-O-methoxyethyl guanosine
  modified_base 2: mod_base = OTHER; note = 2'-O-methoxyethyl 5-methylcytidine
  modified_base 3: mod_base = OTHER; note = 2'-O-methoxyethyl adenosine
  modified_base 4: mod_base = OTHER; note = 2'-O-methoxyethyl guanosine
  modified_base 5: mod_base = OTHER; note = 2'-O-methoxyethyl adenosine
  modified_base 8: mod_base = OTHER; note = 2'-OH uridine
  modified_base 13: mod_base = OTHER; note = 2'-deoxy 5-methylcytidine
  modified_base 16: mod_base = OTHER; note = 2'-O-methoxyethyl adenosine
  modified_base 17: mod_base = OTHER; note = 2'-O-methoxyethyl guanosine
  modified_base 18: mod_base = OTHER; note = 2'-O-methoxyethyl thymidine
  modified_base 19: mod_base = OTHER; note = 2'-O-methoxyethyl guanosine
  modified_base 20: mod_base = OTHER; note = 2'-O-methoxyethyl 5-methylcytidine
  misc_feature 1..5: note = RNA
  misc_feature 6..7: note = DNA
  misc_feature 8: note = RNA
  misc_feature 9..15: note = DNA
  misc_feature 16..20: note = RNA
gcagaggtgaagcgaagtgc

SEQ ID NO: 99 - DNA, 20 bp, synthetic construct
  source 1..20: mol_type = other DNA
  modified_base 1: mod_base = OTHER; note = 2'-O-methoxyethyl guanosine
  modified_base 2: mod_base = OTHER; note = 2'-O-methoxyethyl 5-methylcytidine
  modified_base 3: mod_base = OTHER; note = 2'-O-methoxyethyl adenosine
  modified_base 4: mod_base = OTHER; note = 2'-O-methoxyethyl guanosine
  modified_base 5: mod_base = OTHER; note = 2'-O-methoxyethyl adenosine
  modified_base 9: mod_base = OTHER; note = 2'-OH guanosine
  modified_base 13: mod_base = OTHER; note = 2'-deoxy 5-methylcytidine
  modified_base 16: mod_base = OTHER; note = 2'-O-methoxyethyl adenosine
  modified_base 17: mod_base = OTHER; note = 2'-O-methoxyethyl guanosine
  modified_base 18: mod_base = OTHER; note = 2'-O-methoxyethyl thymidine
  modified_base 19: mod_base = OTHER; note = 2'-O-methoxyethyl guanosine
  modified_base 20: mod_base = OTHER; note = 2'-O-methoxyethyl 5-methylcytidine
  misc_feature 1..5: note = RNA
  misc_feature 6..8: note = DNA
  misc_feature 9: note = RNA
  misc_feature 10..15: note = DNA
  misc_feature 16..20: note = RNA
gcagaggtgaagcgaagtgc

SEQ ID NO: 100 - DNA, 20 bp, synthetic construct
  source 1..20: mol_type = other DNA
  modified_base 1: mod_base = OTHER; note = 2'-O-methoxyethyl guanosine
  modified_base 2: mod_base = OTHER; note = 2'-O-methoxyethyl 5-methylcytidine
  modified_base 3: mod_base = OTHER; note = 2'-O-methoxyethyl adenosine
  modified_base 4: mod_base = OTHER; note = 2'-O-methoxyethyl guanosine
  modified_base 5: mod_base = OTHER; note = 2'-O-methoxyethyl adenosine
  modified_base 10: mod_base = OTHER; note = 2'-OH adenosine
  modified_base 13: mod_base = OTHER; note = 2'-deoxy 5-methylcytidine
  modified_base 16: mod_base = OTHER; note = 2'-O-methoxyethyl adenosine
  modified_base 17: mod_base = OTHER; note = 2'-O-methoxyethyl guanosine
  modified_base 18: mod_base = OTHER; note = 2'-O-methoxyethyl thymidine
  modified_base 19: mod_base = OTHER; note = 2'-O-methoxyethyl guanosine
  modified_base 20: mod_base = OTHER; note = 2'-O-methoxyethyl 5-methylcytidine
  misc_feature 1..5: note = RNA
  misc_feature 6..9: note = DNA
  misc_feature 10: note = RNA
  misc_feature 11..15: note = DNA
  misc_feature 16..20: note = RNA
gcagaggtgaagcgaagtgc

SEQ ID NO: 101 - DNA, 20 bp, synthetic construct
  source 1..20: mol_type = other DNA
  modified_base 1: mod_base = OTHER; note = 2'-O-methoxyethyl guanosine
  modified_base 2: mod_base = OTHER; note = 2'-O-methoxyethyl 5-methylcytidine
  modified_base 3: mod_base = OTHER; note = 2'-O-methoxyethyl adenosine
  modified_base 4: mod_base = OTHER; note = 2'-O-methoxyethyl guanosine
  modified_base 5: mod_base = OTHER; note = 2'-O-methoxyethyl adenosine
  modified_base 11: mod_base = OTHER; note = 2'-OH adenosine
  modified_base 13: mod_base = OTHER; note = 2'-deoxy 5-methylcytidine
  modified_base 16: mod_base = OTHER; note = 2'-O-methoxyethyl adenosine
  modified_base 17: mod_base = OTHER; note = 2'-O-methoxyethyl guanosine
  modified_base 18: mod_base = OTHER; note = 2'-O-methoxyethyl thymidine
  modified_base 19: mod_base = OTHER; note = 2'-O-methoxyethyl guanosine
  modified_base 20: mod_base = OTHER; note = 2'-O-methoxyethyl 5-methylcytidine
  misc_feature 1..5: note = RNA
  misc_feature 6..10: note = DNA
  misc_feature 11: note = RNA
  misc_feature 12..15: note = DNA
  misc_feature 16..20: note = RNA
gcagaggtgaagcgaagtgc

SEQ ID NO: 102 - DNA, 20 bp, synthetic construct
  source 1..20: mol_type = other DNA
  modified_base 1: mod_base = OTHER; note = 2'-O-methoxyethyl guanosine
  modified_base 2: mod_base = OTHER; note = 2'-O-methoxyethyl 5-methylcytidine
  modified_base 3: mod_base = OTHER; note = 2'-O-methoxyethyl adenosine
  modified_base 4: mod_base = OTHER; note = 2'-O-methoxyethyl guanosine
  modified_base 5: mod_base = OTHER; note = 2'-O-methoxyethyl adenosine
  modified_base 12: mod_base = OTHER; note = 2'-OH guanosine
  modified_base 13: mod_base = OTHER; note = 2'-deoxy 5-methylcytidine
  modified_base 16: mod_base = OTHER; note = 2'-O-methoxyethyl adenosine
  modified_base 17: mod_base = OTHER; note = 2'-O-methoxyethyl guanosine
  modified_base 18: mod_base = OTHER; note = 2'-O-methoxyethyl thymidine
  modified_base 19: mod_base = OTHER; note = 2'-O-methoxyethyl guanosine
  modified_base 20: mod_base = OTHER; note = 2'-O-methoxyethyl 5-methylcytidine
  misc_feature 1..5: note = RNA
  misc_feature 6..11: note = DNA
  misc_feature 12: note = RNA
  misc_feature 13..15: note = DNA
  misc_feature 16..20: note = RNA
gcagaggtgaagcgaagtgc

SEQ ID NO: 103 - DNA, 20 bp, synthetic construct
  source 1..20: mol_type = other DNA
  modified_base 1: mod_base = OTHER; note = 2'-O-methoxyethyl guanosine
  modified_base 2: mod_base = OTHER; note = 2'-O-methoxyethyl 5-methylcytidine
  modified_base 3: mod_base = OTHER; note = 2'-O-methoxyethyl adenosine
  modified_base 4: mod_base = OTHER; note = 2'-O-methoxyethyl guanosine
  modified_base 5: mod_base = OTHER; note = 2'-O-methoxyethyl adenosine
  modified_base 13: mod_base = OTHER; note = 2'-OH 5-methylcytidine
  modified_base 16: mod_base = OTHER; note = 2'-O-methoxyethyl adenosine
  modified_base 17: mod_base = OTHER; note = 2'-O-methoxyethyl guanosine
  modified_base 18: mod_base = OTHER; note = 2'-O-methoxyethyl thymidine
  modified_base 19: mod_base = OTHER; note = 2'-O-methoxyethyl guanosine
  modified_base 20: mod_base = OTHER; note = 2'-O-methoxyethyl 5-methylcytidine
  misc_feature 1..5: note = RNA
  misc_feature 6..12: note = DNA
  misc_feature 13: note = RNA
  misc_feature 14..15: note = DNA
  misc_feature 16..20: note = RNA
gcagaggtgaagcgaagtgc

SEQ ID NO: 104 - DNA, 20 bp, synthetic construct
  source 1..20: mol_type = other DNA
  modified_base 1: mod_base = OTHER; note = 2'-O-methoxyethyl guanosine
  modified_base 2: mod_base = OTHER; note = 2'-O-methoxyethyl 5-methylcytidine
  modified_base 3: mod_base = OTHER; note = 2'-O-methoxyethyl adenosine
  modified_base 4: mod_base = OTHER; note = 2'-O-methoxyethyl guanosine
  modified_base 5: mod_base = OTHER; note = 2'-O-methoxyethyl adenosine
  modified_base 13: mod_base = OTHER; note = 2'-deoxy 5-methylcytidine
  modified_base 14: mod_base = OTHER; note = 2'-OH guanosine
  modified_base 16: mod_base = OTHER; note = 2'-O-methoxyethyl adenosine
  modified_base 17: mod_base = OTHER; note = 2'-O-methoxyethyl guanosine
  modified_base 18: mod_base = OTHER; note = 2'-O-methoxyethyl thymidine
  modified_base 19: mod_base = OTHER; note = 2'-O-methoxyethyl guanosine
  modified_base 20: mod_base = OTHER; note = 2'-O-methoxyethyl 5-methylcytidine
  misc_feature 1..5: note = RNA
  misc_feature 6..13: note = DNA
  misc_feature 14: note = RNA
  misc_feature 15: note = DNA
  misc_feature 16..20: note = RNA
gcagaggtgaagcgaagtgc

SEQ ID NO: 105 - DNA, 20 bp, synthetic construct
  source 1..20: mol_type = other DNA
  modified_base 1: mod_base = OTHER; note = 2'-O-methoxyethyl guanosine
  modified_base 2: mod_base = OTHER; note = 2'-O-methoxyethyl 5-methylcytidine
  modified_base 3: mod_base = OTHER; note = 2'-O-methoxyethyl adenosine
  modified_base 4: mod_base = OTHER; note = 2'-O-methoxyethyl guanosine
  modified_base 5: mod_base = OTHER; note = 2'-O-methoxyethyl adenosine
  modified_base 13: mod_base = OTHER; note = 2'-deoxy 5-methylcytidine
  modified_base 15: mod_base = OTHER; note = 2'-OH adenosine
  modified_base 16: mod_base = OTHER; note = 2'-O-methoxyethyl adenosine
  modified_base 17: mod_base = OTHER; note = 2'-O-methoxyethyl guanosine
  modified_base 18: mod_base = OTHER; note = 2'-O-methoxyethyl thymidine
  modified_base 19: mod_base = OTHER; note = 2'-O-methoxyethyl guanosine
  modified_base 20: mod_base = OTHER; note = 2'-O-methoxyethyl 5-methylcytidine
  misc_feature 1..5: note = RNA
  misc_feature 6..14: note = DNA
  misc_feature 15..20: note = RNA
gcagaggtgaagcgaagtgc

SEQ ID NO: 106 - DNA, 20 bp, synthetic construct
  source 1..20: mol_type = other DNA
  modified_base 1: mod_base = OTHER; note = 2'-O-methoxyethyl guanosine
  modified_base 2: mod_base = OTHER; note = 2'-O-methoxyethyl 5-methylcytidine
  modified_base 3: mod_base = OTHER; note = 2'-O-methoxyethyl adenosine
  modified_base 4: mod_base = OTHER; note = 2'-O-methoxyethyl guanosine
  modified_base 5: mod_base = OTHER; note = 2'-O-methoxyethyl adenosine
  modified_base 13: mod_base = OTHER; note = 2'-deoxy 5-methylcytidine
  modified_base 16: mod_base = OTHER; note = 2'-O-methoxyethyl adenosine
  modified_base 17: mod_base = OTHER; note = 2'-O-methoxyethyl guanosine
  modified_base 18: mod_base = OTHER; note = 2'-O-methoxyethyl thymidine
  modified_base 19: mod_base = OTHER; note = 2'-O-methoxyethyl guanosine
  modified_base 20: mod_base = OTHER; note = 2'-O-methoxyethyl 5-methylcytidine
  misc_feature 1..5: note = RNA
  misc_feature 6..15: note = DNA
  misc_feature 16..20: note = RNA
gcagaggagaagcgaagtgc

SEQ ID NO: 107 - DNA, 20 bp, synthetic construct
  source 1..20: mol_type = other DNA
  modified_base 1: mod_base = OTHER; note = 2'-O-methoxyethyl guanosine
  modified_base 2: mod_base = OTHER; note = 2'-O-methoxyethyl 5-methylcytidine
  modified_base 3: mod_base = OTHER; note = 2'-O-methoxyethyl adenosine
  modified_base 4: mod_base = OTHER; note = 2'-O-methoxyethyl guanosine
  modified_base 5: mod_base = OTHER; note = 2'-O-methoxyethyl adenosine
  modified_base 9: mod_base = OTHER; note = 2'-deoxy 5-methylcytidine
  modified_base 13: mod_base = OTHER; note = 2'-deoxy 5-methylcytidine
  modified_base 16: mod_base = OTHER; note = 2'-O-methoxyethyl adenosine
  modified_base 17: mod_base = OTHER; note = 2'-O-methoxyethyl guanosine
  modified_base 18: mod_base = OTHER; note = 2'-O-methoxyethyl thymidine
  modified_base 19: mod_base = OTHER; note = 2'-O-methoxyethyl guanosine
  modified_base 20: mod_base = OTHER; note = 2'-O-methoxyethyl 5-methylcytidine
  misc_feature 1..5: note = RNA
  misc_feature 6..15: note = DNA
  misc_feature 16..20: note = RNA
gcagaggtcaagcgaagtgc

SEQ ID NO: 108 - DNA, 20 bp, synthetic construct
  source 1..20: mol_type = other DNA
  modified_base 1: mod_base = OTHER; note = 2'-O-methoxyethyl guanosine
  modified_base 2: mod_base = OTHER; note = 2'-O-methoxyethyl 5-methylcytidine
  modified_base 3: mod_base = OTHER; note = 2'-O-methoxyethyl adenosine
  modified_base 4: mod_base = OTHER; note = 2'-O-methoxyethyl guanosine
  modified_base 5: mod_base = OTHER; note = 2'-O-methoxyethyl adenosine
  modified_base 13: mod_base = OTHER; note = 2'-deoxy 5-methylcytidine
  modified_base 16: mod_base = OTHER; note = 2'-O-methoxyethyl adenosine
  modified_base 17: mod_base = OTHER; note = 2'-O-methoxyethyl guanosine
  modified_base 18: mod_base = OTHER; note = 2'-O-methoxyethyl thymidine
  modified_base 19: mod_base = OTHER; note = 2'-O-methoxyethyl guanosine
  modified_base 20: mod_base = OTHER; note = 2'-O-methoxyethyl 5-methylcytidine
  misc_feature 1..5: note = RNA
  misc_feature 6..15: note = DNA
  misc_feature 16..20: note = RNA
gcagaggtgtagcgaagtgc

SEQ ID NO: 109 - DNA, 20 bp, synthetic construct
  source 1..20: mol_type = other DNA
  modified_base 1: mod_base = OTHER; note = 2'-O-methoxyethyl guanosine
  modified_base 2: mod_base = OTHER; note = 2'-O-methoxyethyl 5-methylcytidine
  modified_base 3: mod_base = OTHER; note = 2'-O-methoxyethyl adenosine
  modified_base 4: mod_base = OTHER; note = 2'-O-methoxyethyl guanosine
  modified_base 5: mod_base = OTHER; note = 2'-O-methoxyethyl adenosine
  modified_base 13: mod_base = OTHER; note = 2'-deoxy 5-methylcytidine
  modified_base 16: mod_base = OTHER; note = 2'-O-methoxyethyl adenosine
  modified_base 17: mod_base = OTHER; note = 2'-O-methoxyethyl guanosine
  modified_base 18: mod_base = OTHER; note = 2'-O-methoxyethyl thymidine
  modified_base 19: mod_base = OTHER; note = 2'-O-methoxyethyl guanosine
  modified_base 20: mod_base = OTHER; note = 2'-O-methoxyethyl 5-methylcytidine
  misc_feature 1..5: note = RNA
  misc_feature 6..15: note = DNA
  misc_feature 16..20: note = RNA
gcagaggtgatgcgaagtgc

SEQ ID NO: 110 - DNA, 20 bp, synthetic construct
  source 1..20: mol_type = other DNA
  modified_base 1: mod_base = OTHER; note = 2'-O-methoxyethyl guanosine
  modified_base 2: mod_base = OTHER; note = 2'-O-methoxyethyl 5-methylcytidine
  modified_base 3: mod_base = OTHER; note = 2'-O-methoxyethyl adenosine
  modified_base 4: mod_base = OTHER; note = 2'-O-methoxyethyl guanosine
  modified_base 5: mod_base = OTHER; note = 2'-O-methoxyethyl adenosine
  modified_base 12: mod_base = OTHER; note = 2'-deoxy 5-methylcytidine
  modified_base 13: mod_base = OTHER; note = 2'-deoxy 5-methylcytidine
  modified_base 16: mod_base = OTHER; note = 2'-O-methoxyethyl adenosine
  modified_base 17: mod_base = OTHER; note = 2'-O-methoxyethyl guanosine
  modified_base 18: mod_base = OTHER; note = 2'-O-methoxyethyl thymidine
  modified_base 19: mod_base = OTHER; note = 2'-O-methoxyethyl guanosine
  modified_base 20: mod_base = OTHER; note = 2'-O-methoxyethyl 5-methylcytidine
  misc_feature 1..5: note = RNA
  misc_feature 6..15: note = DNA
  misc_feature 16..20: note = RNA
gcagaggtgaaccgaagtgc

SEQ ID NO: 111 - DNA, 20 bp, synthetic construct
  source 1..20: mol_type = other DNA
  modified_base 1: mod_base = OTHER; note = 2'-O-methoxyethyl guanosine
  modified_base 2: mod_base = OTHER; note = 2'-O-methoxyethyl 5-methylcytidine
  modified_base 3: mod_base = OTHER; note = 2'-O-methoxyethyl adenosine
  modified_base 4: mod_base = OTHER; note = 2'-O-methoxyethyl guanosine
  modified_base 5: mod_base = OTHER; note = 2'-O-methoxyethyl adenosine
  modified_base 16: mod_base = OTHER; note = 2'-O-methoxyethyl adenosine
  modified_base 17: mod_base = OTHER; note = 2'-O-methoxyethyl guanosine
  modified_base 18: mod_base = OTHER; note = 2'-O-methoxyethyl thymidine
  modified_base 19: mod_base = OTHER; note = 2'-O-methoxyethyl guanosine
  modified_base 20: mod_base = OTHER; note = 2'-O-methoxyethyl 5-methylcytidine
  misc_feature 1..5: note = RNA
  misc_feature 6..15: note = DNA
  misc_feature 16..20: note = RNA
gcagaggtgaagggaagtgc

SEQ ID NO: 112 - DNA, 20 bp, synthetic construct
  source 1..20: mol_type = other DNA
  modified_base 1: mod_base = OTHER; note = 2'-O-methoxyethyl guanosine
  modified_base 2: mod_base = OTHER; note = 2'-O-methoxyethyl 5-methylcytidine
  modified_base 3: mod_base = OTHER; note = 2'-O-methoxyethyl adenosine
  modified_base 4: mod_base = OTHER; note = 2'-O-methoxyethyl guanosine
  modified_base 5: mod_base = OTHER; note = 2'-O-methoxyethyl adenosine
  modified_base 13: mod_base = OTHER; note = 2'-deoxy 5-methylcytidine
  modified_base 14: mod_base = OTHER; note = 2'-deoxy 5-methylcytidine
  modified_base 16: mod_base = OTHER; note = 2'-O-methoxyethyl adenosine
  modified_base 17: mod_base = OTHER; note = 2'-O-methoxyethyl guanosine
  modified_base 18: mod_base = OTHER; note = 2'-O-methoxyethyl thymidine
  modified_base 19: mod_base = OTHER; note = 2'-O-methoxyethyl guanosine
  modified_base 20: mod_base = OTHER; note = 2'-O-methoxyethyl 5-methylcytidine
  misc_feature 1..5: note = RNA
  misc_feature 6..15: note = DNA
  misc_feature 16..20: note = RNA
gcagaggtgaagccaagtgc

SEQ ID NO: 113 - DNA, 20 bp, synthetic construct
  source 1..20: mol_type = other DNA
  modified_base 1: mod_base = OTHER; note = 2'-O-methoxyethyl guanosine
  modified_base 2: mod_base = OTHER; note = 2'-O-methoxyethyl 5-methylcytidine
  modified_base 3: mod_base = OTHER; note = 2'-O-methoxyethyl adenosine
  modified_base 4: mod_base = OTHER; note = 2'-O-methoxyethyl guanosine
  modified_base 5: mod_base = OTHER; note = 2'-O-methoxyethyl adenosine
  modified_base 13: mod_base = OTHER; note = 2'-deoxy 5-methylcytidine
  modified_base 16: mod_base = OTHER; note = 2'-O-methoxyethyl adenosine
  modified_base 17: mod_base = OTHER; note = 2'-O-methoxyethyl guanosine
  modified_base 18: mod_base = OTHER; note = 2'-O-methoxyethyl thymidine
  modified_base 19: mod_base = OTHER; note = 2'-O-methoxyethyl guanosine
  modified_base 20: mod_base = OTHER; note = 2'-O-methoxyethyl 5-methylcytidine
  misc_feature 1..5: note = RNA
  misc_feature 6..15: note = DNA
  misc_feature 16..20: note = RNA
gcagaggtgaagcgtagtgc

SEQ ID NO: 114 - DNA, 20 bp, synthetic construct
  source 1..20: mol_type = other DNA
  modified_base 1: mod_base = OTHER; note = 2'-O-methoxyethyl guanosine
  modified_base 2: mod_base = OTHER; note = 2'-O-methoxyethyl 5-methylcytidine
  modified_base 3: mod_base = OTHER; note = 2'-O-methoxyethyl adenosine
  modified_base 4: mod_base = OTHER; note = 2'-O-methoxyethyl guanosine
  modified_base 5: mod_base = OTHER; note = 2'-O-methoxyethyl adenosine
  modified_base 13: mod_base = OTHER; note = 2'-deoxy 5-methylcytidine
  modified_base 16: mod_base = OTHER; note = 2'-O-methoxyethyl thymidine
  modified_base 17: mod_base = OTHER; note = 2'-O-methoxyethyl guanosine
  modified_base 18: mod_base = OTHER; note = 2'-O-methoxyethyl thymidine
  modified_base 19: mod_base = OTHER; note = 2'-O-methoxyethyl guanosine
  modified_base 20: mod_base = OTHER; note = 2'-O-methoxyethyl 5-methylcytidine
  misc_feature 1..5: note = RNA
  misc_feature 6..15: note = DNA
  misc_feature 16..20: note = RNA
gcagaggtgaagcgatgtgc

SEQ ID NO: 115 - DNA, 20 bp, synthetic construct
  source 1..20: mol_type = other DNA
  modified_base 1: mod_base = OTHER; note = 2'-O-methoxyethyl guanosine
  modified_base 2: mod_base = OTHER; note = 2'-O-methoxyethyl 5-methylcytidine
  modified_base 3: mod_base = OTHER; note = 2'-O-methoxyethyl adenosine
  modified_base 4: mod_base = OTHER; note = 2'-O-methoxyethyl guanosine
  modified_base 5: mod_base = OTHER; note = 2'-O-methoxyethyl adenosine
  modified_base 6: mod_base = OTHER; note = 2'-OH guanosine
  modified_base 11: mod_base = OTHER; note = 2'-OH adenosine
  modified_base 13: mod_base = OTHER; note = 2'-deoxy 5-methylcytidine
  modified_base 16: mod_base = OTHER; note = 2'-O-methoxyethyl adenosine
  modified_base 17: mod_base = OTHER; note = 2'-O-methoxyethyl guanosine
  modified_base 18: mod_base = OTHER; note = 2'-O-methoxyethyl thymidine
  modified_base 19: mod_base = OTHER; note = 2'-O-methoxyethyl guanosine
  modified_base 20: mod_base = OTHER; note = 2'-O-methoxyethyl 5-methylcytidine
  misc_feature 1..6: note = RNA
  misc_feature 7..10: note = DNA
  misc_feature 11: note = RNA
  misc_feature 12..15: note = DNA
  misc_feature 16..20: note = RNA
gcagaggtgaagcgaagtgc

SEQ ID NO: 116 - DNA, 20 bp, synthetic construct
  source 1..20: mol_type = other DNA
  modified_base 1: mod_base = OTHER; note = 2'-O-methoxyethyl guanosine
  modified_base 2: mod_base = OTHER; note = 2'-O-methoxyethyl 5-methylcytidine
  modified_base 3: mod_base = OTHER; note = 2'-O-methoxyethyl adenosine
  modified_base 4: mod_base = OTHER; note = 2'-O-methoxyethyl guanosine
  modified_base 5: mod_base = OTHER; note = 2'-O-methoxyethyl adenosine
  modified_base 6: mod_base = OTHER; note = 2'-O-methyl guanosine
  modified_base 13: mod_base = OTHER; note = 2'-deoxy 5-methylcytidine
  modified_base 16: mod_base = OTHER; note = 2'-O-methoxyethyl adenosine
  modified_base 17: mod_base = OTHER; note = 2'-O-methoxyethyl guanosine
  modified_base 18: mod_base = OTHER; note = 2'-O-methoxyethyl thymidine
  modified_base 19: mod_base = OTHER; note = 2'-O-methoxyethyl guanosine
  modified_base 20: mod_base = OTHER; note = 2'-O-methoxyethyl 5-methylcytidine
  misc_feature 1..6: note = RNA
  misc_feature 7..15: note = DNA
  misc_feature 16..20: note = RNA
gcagaggtgaagcgaagtgc

SEQ ID NO: 117 - DNA, 20 bp, synthetic construct
  source 1..20: mol_type = other DNA
  modified_base 1: mod_base = OTHER; note = 2'-O-methoxyethyl guanosine
  modified_base 2: mod_base = OTHER; note = 2'-O-methoxyethyl 5-methylcytidine
  modified_base 3: mod_base = OTHER; note = 2'-O-methoxyethyl adenosine
  modified_base 4: mod_base = OTHER; note = 2'-O-methoxyethyl guanosine
  modified_base 5: mod_base = OTHER; note = 2'-O-methoxyethyl adenosine
  modified_base 7: mod_base = OTHER; note = 2'-O-methyl guanosine
  modified_base 13: mod_base = OTHER; note = 2'-deoxy 5-methylcytidine
  modified_base 16: mod_base = OTHER; note = 2'-O-methoxyethyl adenosine
  modified_base 17: mod_base = OTHER; note = 2'-O-methoxyethyl guanosine
  modified_base 18: mod_base = OTHER; note = 2'-O-methoxyethyl thymidine
  modified_base 19: mod_base = OTHER; note = 2'-O-methoxyethyl guanosine
  modified_base 20: mod_base = OTHER; note = 2'-O-methoxyethyl 5-methylcytidine
  misc_feature 1..5: note = RNA
  misc_feature 6: note = DNA
  misc_feature 7: note = RNA
  misc_feature 8..15: note = DNA
  misc_feature 16..20: note = RNA
gcagaggtgaagcgaagtgc

SEQ ID NO: 118 - DNA, 20 bp, synthetic construct
  source 1..20: mol_type = other DNA
  modified_base 1: mod_base = OTHER; note = 2'-O-methoxyethyl guanosine
  modified_base 2: mod_base = OTHER; note = 2'-O-methoxyethyl 5-methylcytidine
  modified_base 3: mod_base = OTHER; note = 2'-O-methoxyethyl adenosine
  modified_base 4: mod_base = OTHER; note = 2'-O-methoxyethyl guanosine
  modified_base 5: mod_base = OTHER; note = 2'-O-methoxyethyl adenosine
  modified_base 8: mod_base = OTHER; note = 2'-O-methyl uridine
  modified_base 13: mod_base = OTHER; note = 2'-deoxy 5-methylcytidine
  modified_base 16: mod_base = OTHER; note = 2'-O-methoxyethyl adenosine
  modified_base 17: mod_base = OTHER; note = 2'-O-methoxyethyl guanosine
  modified_base 18: mod_base = OTHER; note = 2'-O-methoxyethyl thymidine
  modified_base 19: mod_base = OTHER; note = 2'-O-methoxyethyl guanosine
  modified_base 20: mod_base = OTHER; note = 2'-O-methoxyethyl 5-methylcytidine
  misc_feature 1..5: note = RNA
  misc_feature 6..7: note = DNA
  misc_feature 8: note = RNA
  misc_feature 9..15: note = DNA
  misc_feature 16..20: note = RNA
gcagaggtgaagcgaagtgc

SEQ ID NO: 119 - DNA, 20 bp, synthetic construct
  source 1..20: mol_type = other DNA
  modified_base 1: mod_base = OTHER; note = 2'-O-methoxyethyl guanosine
  modified_base 2: mod_base = OTHER; note = 2'-O-methoxyethyl 5-methylcytidine
  modified_base 3: mod_base = OTHER; note = 2'-O-methoxyethyl adenosine
  modified_base 4: mod_base = OTHER; note = 2'-O-methoxyethyl guanosine
  modified_base 5: mod_base = OTHER; note = 2'-O-methoxyethyl adenosine
  modified_base 9: mod_base = OTHER; note = 2'-O-methyl guanosine
  modified_base 13: mod_base = OTHER; note = 2'-deoxy 5-methylcytidine
  modified_base 16: mod_base = OTHER; note = 2'-O-methoxyethyl adenosine
  modified_base 17: mod_base = OTHER; note = 2'-O-methoxyethyl guanosine
  modified_base 18: mod_base = OTHER; note = 2'-O-methoxyethyl thymidine
  modified_base 19: mod_base = OTHER; note = 2'-O-methoxyethyl guanosine
  modified_base 20: mod_base = OTHER; note = 2'-O-methoxyethyl 5-methylcytidine
  misc_feature 1..5: note = RNA
  misc_feature 6..8: note = DNA
  misc_feature 9: note = RNA
  misc_feature 10..15: note = DNA
  misc_feature 16..20: note = RNA
gcagaggtgaagcgaagtgc

SEQ ID NO: 120 - DNA, 20 bp, synthetic construct
  source 1..20: mol_type = other DNA
  modified_base 1: mod_base = OTHER; note = 2'-O-methoxyethyl guanosine
  modified_base 2: mod_base = OTHER; note = 2'-O-methoxyethyl 5-methylcytidine
  modified_base 3: mod_base = OTHER; note = 2'-O-methoxyethyl adenosine
  modified_base 4: mod_base = OTHER; note = 2'-O-methoxyethyl guanosine
  modified_base 5: mod_base = OTHER; note = 2'-O-methoxyethyl adenosine
  modified_base 10: mod_base = OTHER; note = 2'-O-methyl adenosine
  modified_base 13: mod_base = OTHER; note = 2'-deoxy 5-methylcytidine
  modified_base 16: mod_base = OTHER; note = 2'-O-methoxyethyl adenosine
  modified_base 17: mod_base = OTHER; note = 2'-O-methoxyethyl guanosine
  modified_base 18: mod_base = OTHER; note = 2'-O-methoxyethyl thymidine
  modified_base 19: mod_base = OTHER; note = 2'-O-methoxyethyl guanosine
  modified_base 20: mod_base = OTHER; note = 2'-O-methoxyethyl 5-methylcytidine
  misc_feature 1..5: note = RNA
  misc_feature 6..9: note = DNA
  misc_feature 10: note = RNA
  misc_feature 11..15: note = DNA
  misc_feature 16..20: note = RNA
gcagaggtgaagcgaagtgc

SEQ ID NO: 121 - DNA, 20 bp, synthetic construct
  source 1..20: mol_type = other DNA
  modified_base 1: mod_base = OTHER; note = 2'-O-methoxyethyl guanosine
  modified_base 2: mod_base = OTHER; note = 2'-O-methoxyethyl 5-methylcytidine
  modified_base 3: mod_base = OTHER; note = 2'-O-methoxyethyl adenosine
  modified_base 4: mod_base = OTHER; note = 2'-O-methoxyethyl guanosine
  modified_base 5: mod_base = OTHER; note = 2'-O-methoxyethyl adenosine
  modified_base 11: mod_base = OTHER; note = 2'-O-methyl adenosine
  modified_base 13: mod_base = OTHER; note = 2'-deoxy 5-methylcytidine
  modified_base 16: mod_base = OTHER; note = 2'-O-methoxyethyl adenosine
  modified_base 17: mod_base = OTHER; note = 2'-O-methoxyethyl guanosine
  modified_base 18: mod_base = OTHER; note = 2'-O-methoxyethyl thymidine
  modified_base 19: mod_base = OTHER; note = 2'-O-methoxyethyl guanosine
  modified_base 20: mod_base = OTHER; note = 2'-O-methoxyethyl 5-methylcytidine
  misc_feature 1..5: note = RNA
  misc_feature 6..10: note = DNA
  misc_feature 11: note = RNA
  misc_feature 12..15: note = DNA
  misc_feature 16..20: note = RNA
gcagaggtgaagcgaagtgc

SEQ ID NO: 122 - DNA, 20 bp, synthetic construct
  source 1..20: mol_type = other DNA
  modified_base 1: mod_base = OTHER; note = 2'-O-methoxyethyl guanosine
  modified_base 2: mod_base = OTHER; note = 2'-O-methoxyethyl 5-methylcytidine
  modified_base 3: mod_base = OTHER; note = 2'-O-methoxyethyl adenosine
  modified_base 4: mod_base = OTHER; note = 2'-O-methoxyethyl guanosine
  modified_base 5: mod_base = OTHER; note = 2'-O-methoxyethyl adenosine
  modified_base 12: mod_base = OTHER; note = 2'-O-methyl guanosine
  modified_base 13: mod_base = OTHER; note = 2'-deoxy 5-methylcytidine
  modified_base 16: mod_base = OTHER; note = 2'-O-methoxyethyl adenosine
  modified_base 17: mod_base = OTHER; note = 2'-O-methoxyethyl guanosine
  modified_base 18: mod_base = OTHER; note = 2'-O-methoxyethyl thymidine
  modified_base 19: mod_base = OTHER; note = 2'-O-methoxyethyl guanosine
  modified_base 20: mod_base = OTHER; note = 2'-O-methoxyethyl 5-methylcytidine
  misc_feature 1..5: note = RNA
  misc_feature 6..11: note = DNA
  misc_feature 12: note = RNA
  misc_feature 13..15: note = DNA
  misc_feature 16..20: note = RNA
gcagaggtgaagcgaagtgc

SEQ ID NO: 123 - DNA, 20 bp, synthetic construct
  source 1..20: mol_type = other DNA
  modified_base 1: mod_base = OTHER; note = 2'-O-methoxyethyl guanosine
  modified_base 2: mod_base = OTHER; note = 2'-O-methoxyethyl 5-methylcytidine
  modified_base 3: mod_base = OTHER; note = 2'-O-methoxyethyl adenosine
  modified_base 4: mod_base = OTHER; note = 2'-O-methoxyethyl guanosine
  modified_base 5: mod_base = OTHER; note = 2'-O-methoxyethyl adenosine
  modified_base 13: mod_base = OTHER; note = 2'-O-methyl 5-methylcytidine
  modified_base 16: mod_base = OTHER; note = 2'-O-methoxyethyl adenosine
  modified_base 17: mod_base = OTHER; note = 2'-O-methoxyethyl guanosine
  modified_base 18: mod_base = OTHER; note = 2'-O-methoxyethyl thymidine
  modified_base 19: mod_base = OTHER; note = 2'-O-methoxyethyl guanosine
  modified_base 20: mod_base = OTHER; note = 2'-O-methoxyethyl 5-methylcytidine
  misc_feature 1..5: note = RNA
  misc_feature 6..12: note = DNA
  misc_feature 13: note = RNA
  misc_feature 14..15: note = DNA
  misc_feature 16..20: note = RNA
gcagaggtgaagcgaagtgc

SEQ ID NO: 124 - DNA, 20 bp, synthetic construct
  source 1..20: mol_type = other DNA
  modified_base 1: mod_base = OTHER; note = 2'-O-methoxyethyl guanosine
  modified_base 2: mod_base = OTHER; note = 2'-O-methoxyethyl 5-methylcytidine
  modified_base 3: mod_base = OTHER; note = 2'-O-methoxyethyl adenosine
  modified_base 4: mod_base = OTHER; note = 2'-O-methoxyethyl guanosine
  modified_base 5: mod_base = OTHER; note = 2'-O-methoxyethyl adenosine
  modified_base 13: mod_base = OTHER; note = 2'-deoxy 5-methylcytidine
  modified_base 14: mod_base = OTHER; note = 2'-O-methyl guanosine
  modified_base 16: mod_base = OTHER; note = 2'-O-methoxyethyl adenosine
  modified_base 17: mod_base = OTHER; note = 2'-O-methoxyethyl guanosine
  modified_base 18: mod_base = OTHER; note = 2'-O-methoxyethyl thymidine
  modified_base 19: mod_base = OTHER; note = 2'-O-methoxyethyl guanosine
  modified_base 20: mod_base = OTHER; note = 2'-O-methoxyethyl 5-methylcytidine
  misc_feature 1..5: note = RNA
  misc_feature 6..13: note = DNA
  misc_feature 14: note = RNA
  misc_feature 15: note = DNA
  misc_feature 16..20: note = RNA
gcagaggtgaagcgaagtgc

SEQ ID NO: 125 - DNA, 20 bp, synthetic construct
  source 1..20: mol_type = other DNA
  modified_base 1: mod_base = OTHER; note = 2'-O-methoxyethyl guanosine
  modified_base 2: mod_base = OTHER; note = 2'-O-methoxyethyl 5-methylcytidine
  modified_base 3: mod_base = OTHER; note = 2'-O-methoxyethyl adenosine
  modified_base 4: mod_base = OTHER; note = 2'-O-methoxyethyl guanosine
  modified_base 5: mod_base = OTHER; note = 2'-O-methoxyethyl adenosine
  modified_base 13: mod_base = OTHER; note = 2'-deoxy 5-methylcytidine
  modified_base 15: mod_base = OTHER; note = 2'-O-methyl adenosine
  modified_base 16: mod_base = OTHER; note = 2'-O-methoxyethyl adenosine
  modified_base 17: mod_base = OTHER; note = 2'-O-methoxyethyl guanosine
  modified_base 18: mod_base = OTHER; note = 2'-O-methoxyethyl thymidine
  modified_base 19: mod_base = OTHER; note = 2'-O-methoxyethyl guanosine
  modified_base 20: mod_base = OTHER; note = 2'-O-methoxyethyl 5-methylcytidine
  misc_feature 1..5: note = RNA
  misc_feature 6..14: note = DNA
  misc_feature 15..20: note = RNA
gcagaggtgaagcgaagtgc

SEQ ID NO: 126 - DNA, 20 bp, synthetic construct
  source 1..20: mol_type = other DNA
  modified_base 1: mod_base = OTHER; note = 2'-O-methoxyethyl guanosine
  modified_base 2: mod_base = OTHER; note = 2'-O-methoxyethyl 5-methylcytidine
  modified_base 3: mod_base = OTHER; note = 2'-O-methoxyethyl adenosine
  modified_base 4: mod_base = OTHER; note = 2'-O-methoxyethyl guanosine
  modified_base 5: mod_base = OTHER; note = 2'-O-methoxyethyl adenosine
  modified_base 6: mod_base = OTHER; note = 2'-O-methyl guanosine
  modified_base 11: mod_base = OTHER; note = 2'-O-methyl adenosine
  modified_base 13: mod_base = OTHER; note = 2'-deoxy 5-methylcytidine
  modified_base 16: mod_base = OTHER; note = 2'-O-methoxyethyl adenosine
  modified_base 17: mod_base = OTHER; note = 2'-O-methoxyethyl guanosine
  modified_base 18: mod_base = OTHER; note = 2'-O-methoxyethyl thymidine
  modified_base 19: mod_base = OTHER; note = 2'-O-methoxyethyl guanosine
  modified_base 20: mod_base = OTHER; note = 2'-O-methoxyethyl 5-methylcytidine
  misc_feature 1..6: note = RNA
  misc_feature 7..10: note = DNA
  misc_feature 11: note = RNA
  misc_feature 12..15: note = DNA
  misc_feature 16..20: note = RNA
gcagaggtgaagcgaagtgc

SEQ ID NO: 127 - DNA, 20 bp, synthetic construct
  source 1..20: mol_type = other DNA
  modified_base 1: mod_base = OTHER; note = 2'-O-methoxyethyl guanosine
  modified_base 2: mod_base = OTHER; note = 2'-O-methoxyethyl 5-methylcytidine
  modified_base 3: mod_base = OTHER; note = 2'-O-methoxyethyl adenosine
  modified_base 4: mod_base = OTHER; note = 2'-O-methoxyethyl guanosine
  modified_base 5: mod_base = OTHER; note = 2'-O-methoxyethyl adenosine
  modified_base 10: mod_base = OTHER; note = 2'-O-methyl adenosine
  modified_base 13: mod_base = OTHER; note = 2'-deoxy 5-methylcytidine
  modified_base 15: mod_base = OTHER; note = 2'-O-methyl adenosine
  modified_base 16: mod_base = OTHER; note = 2'-O-methoxyethyl adenosine
  modified_base 17: mod_base = OTHER; note = 2'-O-methoxyethyl guanosine
  modified_base 18: mod_base = OTHER; note = 2'-O-methoxyethyl thymidine
  modified_base 19: mod_base = OTHER; note = 2'-O-methoxyethyl guanosine
  modified_base 20: mod_base = OTHER; note = 2'-O-methoxyethyl 5-methylcytidine
  misc_feature 1..5: note = RNA
  misc_feature 6..9: note = DNA
  misc_feature 10: note = RNA
  misc_feature 11..14: note = DNA
  misc_feature 15..20: note = RNA
gcagaggtgaagcgaagtgc

SEQ ID NO: 128 - DNA, 20 bp, synthetic construct
  source 1..20: mol_type = other DNA
  modified_base 1: mod_base = OTHER; note = 2'-O-methoxyethyl guanosine
  modified_base 2: mod_base = OTHER; note = 2'-O-methoxyethyl guanosine
  modified_base 3: mod_base = OTHER; note = 2'-O-methoxyethyl thymidine
  modified_base 4: mod_base = OTHER; note = 2'-O-methoxyethyl 5-methylcytidine
  modified_base 5: mod_base = OTHER; note = 2'-O-methoxyethyl 5-methylcytidine
  modified_base 8: mod_base = OTHER; note = 2'-deoxy 5-methylcytidine
  modified_base 16: mod_base = OTHER; note = 2'-O-methoxyethyl adenosine
  modified_base 17: mod_base = OTHER; note = 2'-O-methoxyethyl adenosine
  modified_base 18: mod_base = OTHER; note = 2'-O-methoxyethyl guanosine
  modified_base 19: mod_base = OTHER; note = 2'-O-methoxyethyl guanosine
  modified_base 20: mod_base = OTHER; note = 2'-O-methoxyethyl 5-methylcytidine
  misc_feature 1..5: note = RNA
  misc_feature 6..15: note = DNA
  misc_feature 16..20: note = RNA
ggtccggcagatgagaaggc

SEQ ID NO: 129 - DNA, 20 bp, synthetic construct
  source 1..20: mol_type = other DNA
  modified_base 1: mod_base = OTHER; note = 2'-O-methoxyethyl 5-methylcytidine
  modified_base 2: mod_base = OTHER; note = 2'-O-methoxyethyl 5-methylcytidine
  modified_base 3: mod_base = OTHER; note = 2'-O-methoxyethyl guanosine
  modified_base 4: mod_base = OTHER; note = 2'-O-methoxyethyl guanosine
  modified_base 5: mod_base = OTHER; note = 2'-O-methoxyethyl 5-methylcytidine
  modified_base 16: mod_base = OTHER; note = 2'-O-methoxyethyl guanosine
  modified_base 17: mod_base = OTHER; note = 2'-O-methoxyethyl 5-methylcytidine
  modified_base 18: mod_base = OTHER; note = 2'-O-methoxyethyl adenosine
  modified_base 19: mod_base = OTHER; note = 2'-O-methoxyethyl 5-methylcytidine
  modified_base 20: mod_base = OTHER; note = 2'-O-methoxyethyl adenosine
  misc_feature 1..5: note = RNA
  misc_feature 6..15: note = DNA
  misc_feature 16..20: note = RNA
ccggcagatgagaaggcaca

SEQ ID NO: 130 - DNA, 20 bp, synthetic construct
  source 1..20: mol_type = other DNA
  modified_base 1: mod_base = OTHER; note = 2'-O-methoxyethyl guanosine
  modified_base 2: mod_base = OTHER; note = 2'-O-methoxyethyl guanosine
  modified_base 3: mod_base = OTHER; note = 2'-O-methoxyethyl 5-methylcytidine
  modified_base 4: mod_base = OTHER; note = 2'-O-methoxyethyl adenosine
  modified_base 5: mod_base = OTHER; note = 2'-O-methoxyethyl 5-methylcytidine
  modified_base 9: mod_base = OTHER; note = 2'-deoxy 5-methylcytidine
  modified_base 16: mod_base = OTHER; note = 2'-O-methoxyethyl thymidine
  modified_base 17: mod_base = OTHER; note = 2'-O-methoxyethyl 5-methylcytidine
  modified_base 18: mod_base = OTHER; note = 2'-O-methoxyethyl 5-methylcytidine
  modified_base 19: mod_base = OTHER; note = 2'-O-methoxyethyl guanosine
  modified_base 20: mod_base = OTHER; note = 2'-O-methoxyethyl 5-methylcytidine
  misc_feature 1..5: note = RNA
  misc_feature 6..15: note = DNA
  misc_feature 16..20: note = RNA
ggcacagacggggagtccgc

SEQ ID NO: 131 - DNA, 20 bp, synthetic construct
  source 1..20: mol_type = other DNA
  modified_base 1: mod_base = OTHER; note = 2'-O-methoxyethyl guanosine
  modified_base 2: mod_base = OTHER; note = 2'-O-methoxyethyl thymidine
  modified_base 3: mod_base = OTHER; note = 2'-O-methoxyethyl 5-methylcytidine
  modified_base 4: mod_base = OTHER; note = 2'-O-methoxyethyl 5-methylcytidine
  modified_base 5: mod_base = OTHER; note = 2'-O-methoxyethyl guanosine
  modified_base 6: mod_base = OTHER; note = 2'-deoxy 5-methylcytidine
  modified_base 16: mod_base = OTHER; note = 2'-O-methoxyethyl guanosine
  modified_base 17: mod_base = OTHER; note = 2'-O-methoxyethyl guanosine
  modified_base 18: mod_base = OTHER; note = 2'-O-methoxyethyl thymidine
  modified_base 19: mod_base = OTHER; note = 2'-O-methoxyethyl guanosine
  modified_base 20: mod_base = OTHER; note = 2'-O-methoxyethyl 5-methylcytidine
  misc_feature 1..5: note = RNA
  misc_feature 6..15: note = DNA
  misc_feature 16..20: note = RNA
gtccgcgtaaagagaggtgc

SEQ ID NO: 132 - DNA, 20 bp, synthetic construct
  source 1..20: mol_type = other DNA
  modified_base 1: mod_base = OTHER; note = 2'-O-methoxyethyl guanosine
  modified_base 2: mod_base = OTHER; note = 2'-O-methoxyethyl 5-methylcytidine
  modified_base 3: mod_base = OTHER; note = 2'-O-methoxyethyl adenosine
  modified_base 4: mod_base = OTHER; note = 2'-O-methoxyethyl guanosine
  modified_base 5: mod_base = OTHER; note = 2'-O-methoxyethyl adenosine
  modified_base 8: mod_base = OTHER; note = 2'-F-ANA with thymine base
  modified_base 13: mod_base = OTHER; note = 2'-deoxy 5-methylcytidine
  modified_base 16: mod_base = OTHER; note = 2'-O-methoxyethyl adenosine
  modified_base 17: mod_base = OTHER; note = 2'-O-methoxyethyl guanosine
  modified_base 18: mod_base = OTHER; note = 2'-O-methoxyethyl uridine
  modified_base 19: mod_base = OTHER; note = 2'-O-methoxyethyl guanosine
  modified_base 20: mod_base = OTHER; note = 2'-O-methoxyethyl 5-methylcytidine
  misc_feature 1..5: note = RNA
  misc_feature 6..7: note = DNA
  misc_feature 8: note = RNA
  misc_feature 9..15: note = DNA
  misc_feature 16..20: note = RNA
gcagaggtgaagcgaagtgc

SEQ ID NO: 133 - DNA, 20 bp, synthetic construct
  source 1..20: mol_type = other DNA
  modified_base 1: mod_base = OTHER; note = 2'-O-methoxyethyl guanosine
  modified_base 2: mod_base = OTHER; note = 2'-O-methoxyethyl 5-methylcytidine
  modified_base 3: mod_base = OTHER; note = 2'-O-methoxyethyl adenosine
  modified_base 4: mod_base = OTHER; note = 2'-O-methoxyethyl guanosine
  modified_base 5: mod_base = OTHER; note = 2'-O-methoxyethyl adenosine
  modified_base 10: mod_base = OTHER; note = 2'-F-ANA with adenine base
  modified_base 13: mod_base = OTHER; note = 2'-deoxy 5-methylcytidine
  modified_base 16: mod_base = OTHER; note = 2'-O-methoxyethyl adenosine
  modified_base 17: mod_base = OTHER; note = 2'-O-methoxyethyl guanosine
  modified_base 18: mod_base = OTHER; note = 2'-O-methoxyethyl uridine
  modified_base 19: mod_base = OTHER; note = 2'-O-methoxyethyl guanosine
  modified_base 20: mod_base = OTHER; note = 2'-O-methoxyethyl 5-methylcytidine
  misc_feature 1..5: note = RNA
  misc_feature 6..9: note = DNA
  misc_feature 10: note = RNA
  misc_feature 11..15: note = DNA
  misc_feature 16..20: note = RNA
gcagaggtgaagcgaagtgc

SEQ ID NO: 134 - DNA, 20 bp, synthetic construct
  source 1..20: mol_type = other DNA
  modified_base 1: mod_base = OTHER; note = 2'-O-methoxyethyl guanosine
  modified_base 2: mod_base = OTHER; note = 2'-O-methoxyethyl 5-methylcytidine
  modified_base 3: mod_base = OTHER; note = 2'-O-methoxyethyl adenosine
  modified_base 4: mod_base = OTHER; note = 2'-O-methoxyethyl guanosine
  modified_base 5: mod_base = OTHER; note = 2'-O-methoxyethyl adenosine
  modified_base 11: mod_base = OTHER; note = 2'-F-ANA with adenine base
  modified_base 13: mod_base = OTHER; note = 2'-deoxy 5-methylcytidine
  modified_base 16: mod_base = OTHER; note = 2'-O-methoxyethyl adenosine
  modified_base 17: mod_base = OTHER; note = 2'-O-methoxyethyl guanosine
  modified_base 18: mod_base = OTHER; note = 2'-O-methoxyethyl uridine
  modified_base 19: mod_base = OTHER; note = 2'-O-methoxyethyl guanosine
  modified_base 20: mod_base = OTHER; note = 2'-O-methoxyethyl 5-methylcytidine
  misc_feature 1..5: note = RNA
  misc_feature 6..10: note = DNA
  misc_feature 11: note = RNA
  misc_feature 12..15: note = DNA
  misc_feature 16..20: note = RNA
gcagaggtgaagcgaagtgc

SEQ ID NO: 135 - DNA, 20 bp, synthetic construct
  source 1..20: mol_type = other DNA
  modified_base 1: mod_base = OTHER; note = 2'-O-methoxyethyl guanosine
  modified_base 2: mod_base = OTHER; note = 2'-O-methoxyethyl 5-methylcytidine
  modified_base 3: mod_base = OTHER; note = 2'-O-methoxyethyl adenosine
  modified_base 4: mod_base = OTHER; note = 2'-O-methoxyethyl guanosine
  modified_base 5: mod_base = OTHER; note = 2'-O-methoxyethyl adenosine
  modified_base 13: mod_base = OTHER; note = 2'-deoxy 5-methylcytidine
  modified_base 14: mod_base = OTHER; note = 2'-F-ANA with guanine base
  modified_base 16: mod_base = OTHER; note = 2'-O-methoxyethyl adenosine
  modified_base 17: mod_base = OTHER; note = 2'-O-methoxyethyl guanosine
  modified_base 18: mod_base = OTHER; note = 2'-O-methoxyethyl uridine
  modified_base 19: mod_base = OTHER; note = 2'-O-methoxyethyl guanosine
  modified_base 20: mod_base = OTHER; note = 2'-O-methoxyethyl 5-methylcytidine
  misc_feature 1..5: note = RNA
  misc_feature 6..13: note = DNA
  misc_feature 14: note = RNA
  misc_feature 15: note = DNA
  misc_feature 16..20: note = RNA
gcagaggtgaagcgaagtgc

SEQ ID NO: 136 - DNA, 20 bp, synthetic construct
  source 1..20: mol_type = other DNA
  modified_base 1: mod_base = OTHER; note = 2'-O-methoxyethyl guanosine
  modified_base 2: mod_base = OTHER; note = 2'-O-methoxyethyl 5-methylcytidine
  modified_base 3: mod_base = OTHER; note = 2'-O-methoxyethyl adenosine
  modified_base 4: mod_base = OTHER; note = 2'-O-methoxyethyl guanosine
  modified_base 5: mod_base = OTHER; note = 2'-O-methoxyethyl adenosine
  modified_base 10: mod_base = OTHER; note = 2'-F-ANA with adenine base
  modified_base 13: mod_base = OTHER; note = 2'-deoxy 5-methylcytidine
  modified_base 14: mod_base = OTHER; note = 2'-F-ANA with guanine base
  modified_base 16: mod_base = OTHER; note = 2'-O-methoxyethyl adenosine
  modified_base 17: mod_base = OTHER; note = 2'-O-methoxyethyl guanosine
  modified_base 18: mod_base = OTHER; note = 2'-O-methoxyethyl uridine
  modified_base 19: mod_base = OTHER; note = 2'-O-methoxyethyl guanosine
  modified_base 20: mod_base = OTHER; note = 2'-O-methoxyethyl 5-methylcytidine
  misc_feature 1..5: note = RNA
  misc_feature 6..9: note = DNA
  misc_feature 10: note = RNA
  misc_feature 11..13: note = DNA
  misc_feature 14: note = RNA
  misc_feature 15: note = DNA
  misc_feature 16..20: note = RNA
gcagaggtgaagcgaagtgc

SEQ ID NO: 137 - DNA, 20 bp, synthetic construct
  source 1..20: mol_type = other DNA
  modified_base 1: mod_base = OTHER; note = 2'-O-methoxyethyl guanosine
  modified_base 2: mod_base = OTHER; note = 2'-O-methoxyethyl 5-methylcytidine
  modified_base 3: mod_base = OTHER; note = 2'-O-methoxyethyl adenosine
  modified_base 4: mod_base = OTHER; note = 2'-O-methoxyethyl guanosine
  modified_base 5: mod_base = OTHER; note = 2'-O-methoxyethyl adenosine
  modified_base 10: mod_base = OTHER; note = Glycol nucleic acid with adenine base
  modified_base 13: mod_base = OTHER; note = 2'-deoxy 5-methylcytidine
  modified_base 16: mod_base = OTHER; note = 2'-O-methoxyethyl adenosine
  modified_base 17: mod_base = OTHER; note = 2'-O-methoxyethyl guanosine
  modified_base 18: mod_base = OTHER; note = 2'-O-methoxyethyl thymidine
  modified_base 19: mod_base = OTHER; note = 2'-O-methoxyethyl guanosine
  modified_base 20: mod_base = OTHER; note = 2'-O-methoxyethyl 5-methylcytidine
  misc_feature 1..5: note = RNA
  misc_feature 6..9: note = DNA
  misc_feature 10: note = RNA
  misc_feature 11..15: note = DNA
  misc_feature 16..20: note = RNA
gcagaggtgaagcgaagtgc

SEQ ID NO: 138 - DNA, 20 bp, synthetic construct
  source 1..20: mol_type = other DNA
  modified_base 1: mod_base = OTHER; note = 2'-O-methoxyethyl guanosine
  modified_base 2: mod_base = OTHER; note = 2'-O-methoxyethyl 5-methylcytidine
  modified_base 3: mod_base = OTHER; note = 2'-O-methoxyethyl adenosine
  modified_base 4: mod_base = OTHER; note = 2'-O-methoxyethyl guanosine
  modified_base 5: mod_base = OTHER; note = 2'-O-methoxyethyl adenosine
  modified_base 11: mod_base = OTHER; note = Glycol nucleic acid with adenine base
  modified_base 13: mod_base = OTHER; note = 2'-deoxy 5-methylcytidine
  modified_base 16: mod_base = OTHER; note = 2'-O-methoxyethyl adenosine
  modified_base 17: mod_base = OTHER; note = 2'-O-methoxyethyl guanosine
  modified_base 18: mod_base = OTHER; note = 2'-O-methoxyethyl thymidine
  modified_base 19: mod_base = OTHER; note = 2'-O-methoxyethyl guanosine
  modified_base 20: mod_base = OTHER; note = 2'-O-methoxyethyl 5-methylcytidine
  misc_feature 1..5: note = RNA
  misc_feature 6..10: note = DNA
  misc_feature 11: note = RNA
  misc_feature 12..15: note = DNA
  misc_feature 16..20: note = RNA
gcagaggtgaagcgaagtgc

SEQ ID NO: 139 - DNA, 20 bp, synthetic construct
  source 1..20: mol_type = other DNA
  modified_base 1: mod_base = OTHER; note = 2'-O-methoxyethyl guanosine
  modified_base 2: mod_base = OTHER; note = 2'-O-methoxyethyl 5-methylcytidine
  modified_base 3: mod_base = OTHER; note = 2'-O-methoxyethyl adenosine
  modified_base 4: mod_base = OTHER; note = 2'-O-methoxyethyl guanosine
  modified_base 5: mod_base = OTHER; note = 2'-O-methoxyethyl adenosine
  modified_base 6: mod_base = OTHER; note = 2'-O-methyl guanosine
  modified_base 11: mod_base = OTHER; note = 2'-O-methyl adenosine
  modified_base 13: mod_base = OTHER; note = 2'-deoxy 5-methylcytidine
  modified_base 16: mod_base = OTHER; note = 2'-O-methoxyethyl adenosine
  modified_base 17: mod_base = OTHER; note = 2'-O-methoxyethyl 5-methylcytidine
  modified_base 18: mod_base = OTHER; note = 2'-O-methoxyethyl thymidine
  modified_base 19: mod_base = OTHER; note = 2'-O-methoxyethyl guanosine
  modified_base 20: mod_base = OTHER; note = 2'-O-methoxyethyl 5-methylcytidine
  misc_feature 1..6: note = RNA
  misc_feature 7..10: note = DNA
  misc_feature 11: note = RNA
  misc_feature 12..15: note = DNA
  misc_feature 16..20: note = RNA
gcagaggtgaagcgaactgc

SEQ ID NO: 140 - DNA, 20 bp, synthetic construct
  source 1..20: mol_type = other DNA
  modified_base 1: mod_base = OTHER; note = 2'-O-methoxyethyl guanosine
  modified_base 2: mod_base = OTHER; note = 2'-O-methoxyethyl 5-methylcytidine
  modified_base 3: mod_base = OTHER; note = 2'-O-methoxyethyl adenosine
  modified_base 4: mod_base = OTHER; note = 2'-O-methoxyethyl guanosine
  modified_base 5: mod_base = OTHER; note = 2'-O-methoxyethyl adenosine
  modified_base 6: mod_base = OTHER; note = 2'-O-methyl guanosine
  modified_base 11: mod_base = OTHER; note = 2'-O-methyl adenosine
  modified_base 13: mod_base = OTHER; note = 2'-deoxy 5-methylcytidine
  modified_base 16: mod_base = OTHER; note = 2'-O-methoxyethyl adenosine
  modified_base 17: mod_base = OTHER; note = 2'-O-methoxyethyl guanosine
  modified_base 18: mod_base = OTHER; note = 2'-O-methoxyethyl adenosine
  modified_base 19: mod_base = OTHER; note = 2'-O-methoxyethyl guanosine
  modified_base 20: mod_base = OTHER; note = 2'-O-methoxyethyl 5-methylcytidine
  misc_feature 1..6: note = RNA
  misc_feature 7..10: note = DNA
  misc_feature 11: note = RNA
  misc_feature 12..15: note = DNA
  misc_feature 16..20: note = RNA
gcagaggtgaagcgaagagc

SEQ ID NO: 141 - DNA, 20 bp, synthetic construct
  source 1..20: mol_type = other DNA
  modified_base 1: mod_base = OTHER; note = 2'-O-methoxyethyl guanosine
  modified_base 2: mod_base = OTHER; note = 2'-O-methoxyethyl 5-methylcytidine
  modified_base 3: mod_base = OTHER; note = 2'-O-methoxyethyl adenosine
  modified_base 4: mod_base = OTHER; note = 2'-O-methoxyethyl guanosine
  modified_base 5: mod_base = OTHER; note = 2'-O-methoxyethyl adenosine
  modified_base 6: mod_base = OTHER; note = 2'-O-methyl guanosine
  modified_base 11: mod_base = OTHER; note = 2'-O-methyl adenosine
  modified_base 13: mod_base = OTHER; note = 2'-deoxy 5-methylcytidine
  modified_base 16: mod_base = OTHER; note = 2'-O-methoxyethyl adenosine
  modified_base 17: mod_base = OTHER; note = 2'-O-methoxyethyl guanosine
  modified_base 18: mod_base = OTHER; note = 2'-O-methoxyethyl thymidine
  modified_base 19: mod_base = OTHER; note = 2'-O-methoxyethyl 5-methylcytidine
  modified_base 20: mod_base = OTHER; note = 2'-O-methoxyethyl 5-methylcytidine
  misc_feature 1..6: note = RNA
  misc_feature 7..10: note = DNA
  misc_feature 11: note = RNA
  misc_feature 12..15: note = DNA
  misc_feature 16..20: note = RNA
gcagaggtgaagcgaagtcc

SEQ ID NO: 142 - DNA, 20 bp, synthetic construct
  source 1..20: mol_type = other DNA
  modified_base 1: mod_base = OTHER; note = 2'-O-methoxyethyl guanosine
  modified_base 2: mod_base = OTHER; note = 2'-O-methoxyethyl 5-methylcytidine
  modified_base 3: mod_base = OTHER; note = 2'-O-methoxyethyl adenosine
  modified_base 4: mod_base = OTHER; note = 2'-O-methoxyethyl guanosine
  modified_base 5: mod_base = OTHER; note = 2'-O-methoxyethyl adenosine
  modified_base 6: mod_base = OTHER; note = 2'-O-methyl guanosine
  modified_base 11: mod_base = OTHER; note = 2'-O-methyl adenosine
  modified_base 13: mod_base = OTHER; note = 2'-deoxy 5-methylcytidine
  modified_base 16: mod_base = OTHER; note = 2'-O-methoxyethyl adenosine
  modified_base 17: mod_base = OTHER; note = 2'-O-methoxyethyl guanosine
  modified_base 18: mod_base = OTHER; note = 2'-O-methoxyethyl thymidine
  modified_base 19: mod_base = OTHER; note = 2'-O-methoxyethyl guanosine
  modified_base 20: mod_base = OTHER; note = 2'-O-methoxyethyl guanosine
  misc_feature 1..6: note = RNA
  misc_feature 7..10: note = DNA
  misc_feature 11: note = RNA
  misc_feature 12..15: note = DNA
  misc_feature 16..20: note = RNA
gcagaggtgaagcgaagtgg

SEQ ID NO: 143 - DNA, 20 bp, synthetic construct
  source 1..20: mol_type = other DNA
  modified_base 1: mod_base = OTHER; note = 2'-O-methoxyethyl guanosine
  modified_base 2: mod_base = OTHER; note = 2'-O-methoxyethyl 5-methylcytidine
  modified_base 3: mod_base = OTHER; note = 2'-O-methoxyethyl adenosine
  modified_base 4: mod_base = OTHER; note = 2'-O-methoxyethyl guanosine
  modified_base 5: mod_base = OTHER; note = 2'-O-methoxyethyl adenosine
  modified_base 13: mod_base = OTHER; note = Glycol nucleic acid with 5-methylcytidine base
  modified_base 16: mod_base = OTHER; note = 2'-O-methoxyethyl adenosine
  modified_base 17: mod_base = OTHER; note = 2'-O-methoxyethyl guanosine
  modified_base 18: mod_base = OTHER; note = 2'-O-methoxyethyl thymidine
  modified_base 19: mod_base = OTHER; note = 2'-O-methoxyethyl guanosine
  modified_base 20: mod_base = OTHER; note = 2'-O-methoxyethyl 5-methylcytidine
  misc_feature 1..5: note = RNA
  misc_feature 6..12: note = DNA
  misc_feature 13: note = RNA
  misc_feature 14..15: note = DNA
  misc_feature 16..20: note = RNA
gcagaggtgaagcgaagtgc

SEQ ID NO: 144 - DNA, 20 bp, synthetic construct
  source 1..20: mol_type = other DNA
  modified_base 1: mod_base = OTHER; note = 2'-O-methoxyethyl guanosine
  modified_base 2: mod_base = OTHER; note = Glycol nucleic acid with 5-methylcytidine base
  modified_base 3: mod_base = OTHER; note = 2'-O-methoxyethyl adenosine
  modified_base 4: mod_base = OTHER; note = 2'-O-methoxyethyl guanosine
  modified_base 5: mod_base = OTHER; note = 2'-O-methoxyethyl adenosine
  modified_base 13: mod_base = OTHER; note = 2'-deoxy 5-methylcytidine
  modified_base 16: mod_base = OTHER; note = 2'-O-methoxyethyl adenosine
  modified_base 17: mod_base = OTHER; note = 2'-O-methoxyethyl guanosine
  modified_base 18: mod_base = OTHER; note = 2'-O-methoxyethyl thymidine
  modified_base 19: mod_base = OTHER; note = 2'-O-methoxyethyl guanosine
  modified_base 20: mod_base = OTHER; note = 2'-O-methoxyethyl 5-methylcytidine
  misc_feature 1..5: note = RNA
  misc_feature 6..15: note = DNA
  misc_feature 16..20: note = RNA
gcagaggtgaagcgaagtgc

SEQ ID NO: 145 - DNA, 20 bp, synthetic construct
  source 1..20: mol_type = other DNA
  modified_base 1: mod_base = OTHER; note = 2'-O-methoxyethyl guanosine
  modified_base 2: mod_base = OTHER; note = Glycol nucleic acid with 5-methylcytidine base
  modified_base 3: mod_base = OTHER; note = 2'-O-methoxyethyl adenosine
  modified_base 4: mod_base = OTHER; note = 2'-O-methoxyethyl guanosine
  modified_base 5: mod_base = OTHER; note = 2'-O-methoxyethyl adenosine
  modified_base 13: mod_base = OTHER; note = Glycol nucleic acid with 5-methylcytidine base
  modified_base 16: mod_base = OTHER; note = 2'-O-methoxyethyl adenosine
  modified_base 17: mod_base = OTHER; note = 2'-O-methoxyethyl guanosine
  modified_base 18: mod_base = OTHER; note = 2'-O-methoxyethyl thymidine
  modified_base 19: mod_base = OTHER; note = 2'-O-methoxyethyl guanosine
  modified_base 20: mod_base = OTHER; note = 2'-O-methoxyethyl 5-methylcytidine
  misc_feature 1..5: note = RNA
  misc_feature 6..12: note = DNA
  misc_feature 13: note = RNA
  misc_feature 14..15: note = DNA
  misc_feature 16..20: note = RNA
gcagaggtgaagcgaagtgc

SEQ ID NO: 146 - DNA, 20 bp, synthetic construct
  source 1..20: mol_type = other DNA
  modified_base 1: mod_base = OTHER; note = 2'-O-methoxyethyl guanosine
  modified_base 2: mod_base = OTHER; note = 2'-O-methoxyethyl 5-methylcytidine
  modified_base 3: mod_base = OTHER; note = 2'-O-methoxyethyl adenosine
  modified_base 4: mod_base = OTHER; note = 2'-O-methoxyethyl guanosine
  modified_base 5: mod_base = OTHER; note = 2'-O-methoxyethyl adenosine
  modified_base 6: mod_base = OTHER; note = 2'-O-methyl guanosine
  modified_base 11: mod_base = OTHER; note = 2'-O-methyl adenosine
  modified_base 13: mod_base = OTHER; note = Glycol nucleic acid with 5-methylcytidine base
  modified_base 16: mod_base = OTHER; note = 2'-O-methoxyethyl adenosine
  modified_base 17: mod_base = OTHER; note = 2'-O-methoxyethyl guanosine
  modified_base 18: mod_base = OTHER; note = 2'-O-methoxyethyl thymidine
  modified_base 19: mod_base = OTHER; note = 2'-O-methoxyethyl guanosine
  modified_base 20: mod_base = OTHER; note = 2'-O-methoxyethyl 5-methylcytidine
  misc_feature 1..6: note = RNA
  misc_feature 7..10: note = DNA
  misc_feature 11: note = RNA
  misc_feature 12: note = DNA
  misc_feature 13: note = RNA
  misc_feature 14..15: note = DNA
  misc_feature 16..20: note = RNA
gcagaggtgaagcgaagtgc

SEQ ID NO: 147 - DNA, 20 bp, synthetic construct
  source 1..20: mol_type = other DNA
  modified_base 1: mod_base = OTHER; note = 2'-O-methoxyethyl guanosine
  modified_base 2: mod_base = OTHER; note = Glycol nucleic acid with 5-methylcytidine base
  modified_base 3: mod_base = OTHER; note = 2'-O-methoxyethyl adenosine
  modified_base 4: mod_base = OTHER; note = 2'-O-methoxyethyl guanosine
  modified_base 5: mod_base = OTHER; note = 2'-O-methoxyethyl adenosine
  modified_base 6: mod_base = OTHER; note = 2'-O-methyl guanosine
  modified_base 11: mod_base = OTHER; note = 2'-O-methyl adenosine
  modified_base 13: mod_base = OTHER; note = 2'-deoxy 5-methylcytidine
  modified_base 16: mod_base = OTHER; note = 2'-O-methoxyethyl adenosine
  modified_base 17: mod_base = OTHER; note = 2'-O-methoxyethyl guanosine
  modified_base 18: mod_base = OTHER; note = 2'-O-methoxyethyl thymidine
  modified_base 19: mod_base = OTHER; note = 2'-O-methoxyethyl guanosine
  modified_base 20: mod_base = OTHER; note = 2'-O-methoxyethyl 5-methylcytidine
  misc_feature 1..6: note = RNA
  misc_feature 7..10: note = DNA
  misc_feature 11: note = RNA
  misc_feature 12..15: note = DNA
  misc_feature 16..20: note = RNA
gcagaggtgaagcgaagtgc

SEQ ID NO: 148 - DNA, 20 bp, synthetic construct
  source 1..20: mol_type = other DNA
  modified_base 1: mod_base = OTHER; note = 2'-O-methoxyethyl guanosine
  modified_base 2: mod_base = OTHER; note = Glycol nucleic acid with 5-methylcytidine base
  modified_base 3: mod_base = OTHER; note = 2'-O-methoxyethyl adenosine
  modified_base 4: mod_base = OTHER; note = 2'-O-methoxyethyl guanosine
  modified_base 5: mod_base = OTHER; note = 2'-O-methoxyethyl adenosine
  modified_base 6: mod_base = OTHER; note = 2'-O-methyl guanosine
  modified_base 11: mod_base = OTHER; note = 2'-O-methyl adenosine
  modified_base 13: mod_base = OTHER; note = Glycol nucleic acid with 5-methylcytidine base
  modified_base 16: mod_base = OTHER; note = 2'-O-methoxyethyl adenosine
  modified_base 17: mod_base = OTHER; note = 2'-O-methoxyethyl guanosine
  modified_base 18: mod_base = OTHER; note = 2'-O-methoxyethyl thymidine
  modified_base 19: mod_base = OTHER; note = 2'-O-methoxyethyl guanosine
  modified_base 20: mod_base = OTHER; note = 2'-O-methoxyethyl 5-methylcytidine
  misc_feature 1..6: note = RNA
  misc_feature 7..10: note = DNA
  misc_feature 11: note = RNA
  misc_feature 12: note = DNA
  misc_feature 13: note = RNA
  misc_feature 14..15: note = DNA
  misc_feature 16..20: note = RNA
gcagaggtgaagcgaagtgc

SEQ ID NO: 149 - DNA, 20 bp, synthetic construct
  source 1..20: mol_type = other DNA
  modified_base 1: mod_base = OTHER; note = 2'-O-methoxyethyl guanosine
  modified_base 2: mod_base = OTHER; note = 2'-O-methoxyethyl 5-methylcytidine
  modified_base 3: mod_base = OTHER; note = 2'-O-methoxyethyl adenosine
  modified_base 4: mod_base = OTHER; note = 2'-O-methoxyethyl guanosine
  modified_base 5: mod_base = OTHER; note = 2'-O-methoxyethyl adenosine
  modified_base 6: mod_base = OTHER; note = 2'-O-methyl guanosine
  modified_base 11: mod_base = OTHER; note = 2'-O-methyl adenosine
  modified_base 13: mod_base = OTHER; note = Glycol nucleic acid with 5-methylcytidine base
  modified_base 16: mod_base = OTHER; note = Locked nucleic acid with adenine base
  modified_base 17: mod_base = OTHER; note = 2'-O-methoxyethyl guanosine
  modified_base 18: mod_base = OTHER; note = Locked nucleic acid with thymine base
  modified_base 19: mod_base = OTHER; note = 2'-O-methoxyethyl guanosine
  modified_base 20: mod_base = OTHER; note = Locked nucleic acid with 5-methylcytidine base
  misc_feature 1..6: note = RNA
  misc_feature 7..10: note = DNA
  misc_feature 11: note = RNA
  misc_feature 12: note = DNA
  misc_feature 13: note = RNA
  misc_feature 14..15: note = DNA
  misc_feature 16..20: note = RNA
gcagaggtgaagcgaagtgc

SEQ ID NO: 150 - DNA, 20 bp, synthetic construct
  source 1..20: mol_type = other DNA
  modified_base 1: mod_base = OTHER; note = 2'-O-methoxyethyl guanosine
  modified_base 2: mod_base = OTHER; note = Glycol nucleic acid with 5-methylcytidine base
  modified_base 3: mod_base = OTHER; note = 2'-O-methoxyethyl adenosine
  modified_base 4: mod_base = OTHER; note = 2'-O-methoxyethyl guanosine
  modified_base 5: mod_base = OTHER; note = 2'-O-methoxyethyl adenosine
  modified_base 6: mod_base = OTHER; note = 2'-O-methyl guanosine
  modified_base 11: mod_base = OTHER; note = 2'-O-methyl adenosine
  modified_base 13: mod_base = OTHER; note = Glycol nucleic acid with 5-methylcytidine base
  modified_base 16: mod_base = OTHER; note = Locked nucleic acid with adenine base
  modified_base 17: mod_base = OTHER; note = 2'-O-methoxyethyl guanosine
  modified_base 18: mod_base = OTHER; note = Locked nucleic acid with thymine base
  modified_base 19: mod_base = OTHER; note = 2'-O-methoxyethyl guanosine
  modified_base 20: mod_base = OTHER; note = Locked nucleic acid with 5-methylcytidine base
  misc_feature 1..6: note = RNA
  misc_feature 7..10: note = DNA
  misc_feature 11: note = RNA
  misc_feature 12: note = DNA
  misc_feature 13: note = RNA
  misc_feature 14..15: note = DNA
  misc_feature 16..20: note = RNA
gcagaggtgaagcgaagtgc

SEQ ID NO: 151 - DNA, 20 bp, synthetic construct
  source 1..20: mol_type = other DNA
  modified_base 1: mod_base = OTHER; note = 2'-O-methoxyethyl guanosine
  modified_base 2: mod_base = OTHER; note = Glycol nucleic acid with 5-methylcytidine base
  modified_base 3: mod_base = OTHER; note = 2'-O-methoxyethyl adenosine
  modified_base 4: mod_base = OTHER; note = 2'-O-methoxyethyl guanosine
  modified_base 5: mod_base = OTHER; note = 2'-O-methoxyethyl adenosine
  modified_base 10: mod_base = OTHER; note = 2'-O-methyl adenosine
  modified_base 13: mod_base = OTHER; note = Glycol nucleic acid with 5-methylcytidine base
  modified_base 15: mod_base = OTHER; note = 2'-O-methyl adenosine
  modified_base 16: mod_base = OTHER; note = Locked nucleic acid with adenine base
  modified_base 17: mod_base = OTHER; note = 2'-O-methoxyethyl guanosine
  modified_base 18: mod_base = OTHER; note = Locked nucleic acid with thymine base
  modified_base 19: mod_base = OTHER; note = 2'-O-methoxyethyl guanosine
  modified_base 20: mod_base = OTHER; note = Locked nucleic acid with 5-methylcytidine base
  misc_feature 1..5: note = RNA
  misc_feature 6..9: note = DNA
  misc_feature 10: note = RNA
  misc_feature 11..12: note = DNA
  misc_feature 13: note = RNA
  misc_feature 14: note = DNA
  misc_feature 15..20: note = RNA
gcagaggtgaagcgaagtgc

SEQ ID NO: 152 - DNA, 20 bp, synthetic construct
  source 1..20: mol_type = other DNA
  modified_base 1: mod_base = OTHER; note = 2'-O-methoxyethyl guanosine
  modified_base 2: mod_base = OTHER; note = Glycol nucleic acid with 5-methylcytidine base
  modified_base 3: mod_base = OTHER; note = Locked nucleic acid with adenine base
  modified_base 4: mod_base = OTHER; note = 2'-O-methoxyethyl guanosine
  modified_base 5: mod_base = OTHER; note = 2'-O-methoxyethyl adenosine
  modified_base 6: mod_base = OTHER; note = 2'-O-methyl guanosine
  modified_base 11: mod_base = OTHER; note = 2'-O-methyl adenosine
  modified_base 13: mod_base = OTHER; note = Glycol nucleic acid with 5-methylcytidine base
  modified_base 16: mod_base = OTHER; note = Locked nucleic acid with adenine base
  modified_base 17: mod_base = OTHER; note = 2'-O-methoxyethyl guanosine
  modified_base 18: mod_base = OTHER; note = Locked nucleic acid with thymine base
  modified_base 19: mod_base = OTHER; note = 2'-O-methoxyethyl guanosine
  modified_base 20: mod_base = OTHER; note = Locked nucleic acid with 5-methylcytidine base
  misc_feature 1..6: note = RNA
  misc_feature 7..10: note = DNA
  misc_feature 11: note = RNA
  misc_feature 12: note = DNA
  misc_feature 13: note = RNA
  misc_feature 14..15: note = DNA
  misc_feature 16..20: note = RNA
gcagaggtgaagcgaagtgc

SEQ ID NO: 153 - DNA, 22 bp, synthetic construct
  source 1..22: mol_type = other DNA
  modified_base 4: mod_base = OTHER; note = 2'-deoxy cytidine
  modified_base 11: mod_base = OTHER; note = Glycol nucleic acid with 5-methylcytidine base
  modified_base 15: mod_base = OTHER; note = Glycol nucleic acid with 5-methylcytidine base
  misc_feature 1..10: note = DNA
  misc_feature 11: note = RNA
  misc_feature 12..14: note = DNA
  misc_feature 15: note = RNA
  misc_feature 16..22: note = DNA
tgactgtgaacgttcgagatga

SEQ ID NO: 154 - DNA, 20 bp, synthetic construct
  source 1..20: mol_type = other DNA
  modified_base 1: mod_base = OTHER; note = 2'-O-methoxyethyl guanosine
  modified_base 2: mod_base = OTHER; note = 2'-O-methoxyethyl 5-methylcytidine
  modified_base 3: mod_base = OTHER; note = 2'-O-methoxyethyl adenosine
  modified_base 4: mod_base = OTHER; note = 2'-O-methoxyethyl guanosine
  modified_base 5: mod_base = OTHER; note = 2'-O-methoxyethyl adenosine
  modified_base 11: mod_base = OTHER; note = 2'-O-methoxyethyl adenosine
  modified_base 13: mod_base = OTHER; note = 2'-deoxy 5-methylcytidine
  modified_base 16: mod_base = OTHER; note = 2'-O-methoxyethyl adenosine
  modified_base 17: mod_base = OTHER; note = 2'-O-methoxyethyl guanosine
  modified_base 18: mod_base = OTHER; note = 2'-O-methoxyethyl thymidine
  modified_base 19: mod_base = OTHER; note = 2'-O-methoxyethyl guanosine
  modified_base 20: mod_base = OTHER; note = 2'-O-methoxyethyl 5-methylcytidine
  misc_feature 1..5: note = RNA
  misc_feature 6..10: note = DNA
  misc_feature 11: note = RNA
  misc_feature 12..15: note = DNA
  misc_feature 16..20: note = RNA
gcagaggtgaagcgaagtgc

SEQ ID NO: 155 - DNA, 20 bp, synthetic construct
  source 1..20: mol_type = other DNA
  modified_base 1: mod_base = OTHER; note = 2'-O-methoxyethyl guanosine
  modified_base 2: mod_base = OTHER; note = 2'-O-methoxyethyl 5-methylcytidine
  modified_base 3: mod_base = OTHER; note = 2'-O-methoxyethyl adenosine
  modified_base 4: mod_base = OTHER; note = 2'-O-methoxyethyl guanosine
  modified_base 5: mod_base = OTHER; note = 2'-O-methoxyethyl adenosine
  modified_base 10: mod_base = OTHER; note = 2'-O-methoxyethyl adenosine
  modified_base 13: mod_base = OTHER; note = 2'-deoxy 5-methylcytidine
  modified_base 16: mod_base = OTHER; note = 2'-O-methoxyethyl adenosine
  modified_base 17: mod_base = OTHER; note = 2'-O-methoxyethyl guanosine
  modified_base 18: mod_base = OTHER; note = 2'-O-methoxyethyl thymidine
  modified_base 19: mod_base = OTHER; note = 2'-O-methoxyethyl guanosine
  modified_base 20: mod_base = OTHER; note = 2'-O-methoxyethyl 5-methylcytidine
  misc_feature 1..5: note = RNA
  misc_feature 6..9: note = DNA
  misc_feature 10: note = RNA
  misc_feature 11..15: note = DNA
  misc_feature 16..20: note = RNA
gcagaggtgaagcgaagtgc

SEQ ID NO: 156 - DNA, 20 bp, synthetic construct
  source 1..20: mol_type = other DNA
  modified_base 1: mod_base = OTHER; note = 2'-O-methoxyethyl guanosine
  modified_base 2: mod_base = OTHER; note = 2'-O-methoxyethyl 5-methylcytidine
  modified_base 3: mod_base = OTHER; note = 2'-O-methoxyethyl adenosine
  modified_base 4: mod_base = OTHER; note = 2'-O-methoxyethyl guanosine
  modified_base 5: mod_base = OTHER; note = 2'-O-methoxyethyl adenosine
  modified_base 10: mod_base = OTHER; note = 2'-O-methoxyethyl adenosine
  modified_base 13: mod_base = OTHER; note = 2'-deoxy 5-methylcytidine
  modified_base 15: mod_base = OTHER; note = 2'-O-methoxyethyl adenosine
  modified_base 16: mod_base = OTHER; note = 2'-O-methoxyethyl adenosine
  modified_base 17: mod_base = OTHER; note = 2'-O-methoxyethyl guanosine
  modified_base 18: mod_base = OTHER; note = 2'-O-methoxyethyl thymidine
  modified_base 19: mod_base = OTHER; note = 2'-O-methoxyethyl guanosine
  modified_base 20: mod_base = OTHER; note = 2'-O-methoxyethyl 5-methylcytidine
  misc_feature 1..5: note = RNA
  misc_feature 6..9: note = DNA
  misc_feature 10: note = RNA
  misc_feature 11..14: note = DNA
  misc_feature 15..20: note = RNA
gcagaggtgaagcgaagtgc

SEQ ID NO: 157 - DNA, 20 bp, synthetic construct
  source 1..20: mol_type = other DNA
  modified_base 1: mod_base = OTHER; note = 2'-O-methoxyethyl guanosine
  modified_base 2: mod_base = OTHER; note = 2'-O-methoxyethyl 5-methylcytidine
  modified_base 3: mod_base = OTHER; note = 2'-O-methoxyethyl adenosine
  modified_base 4: mod_base = OTHER; note = 2'-O-methoxyethyl guanosine
  modified_base 5: mod_base = OTHER; note = 2'-O-methoxyethyl adenosine
  modified_base 6: mod_base = OTHER; note = 2'-O-methoxyethyl guanosine
  modified_base 11: mod_base = OTHER; note = 2'-O-methoxyethyl adenosine
  modified_base 13: mod_base = OTHER; note = 2'-deoxy 5-methylcytidine
  modified_base 16: mod_base = OTHER; note = 2'-O-methoxyethyl adenosine
  modified_base 17: mod_base = OTHER; note = 2'-O-methoxyethyl guanosine
  modified_base 18: mod_base = OTHER; note = 2'-O-methoxyethyl thymidine
  modified_base 19: mod_base = OTHER; note = 2'-O-methoxyethyl guanosine
  modified_base 20: mod_base = OTHER; note = 2'-O-methoxyethyl 5-methylcytidine
  misc_feature 1..6: note = RNA
  misc_feature 7..10: note = DNA
  misc_feature 11: note = RNA
  misc_feature 12..15: note = DNA
  misc_feature 16..20: note = RNA
gcagaggtgaagcgaagtgc

SEQ ID NO: 158 - DNA, 20 bp, synthetic construct
  source 1..20: mol_type = other DNA
  modified_base 1: mod_base = OTHER; note = 2'-O-methoxyethyl guanosine
  modified_base 2: mod_base = OTHER; note = 2'-O-methoxyethyl 5-methylcytidine
  modified_base 3: mod_base = OTHER; note = 2'-O-methoxyethyl adenosine
  modified_base 4: mod_base = OTHER; note = 2'-O-methoxyethyl guanosine
  modified_base 5: mod_base = OTHER; note = 2'-O-methoxyethyl adenosine
  modified_base 10: mod_base = OTHER; note = 2'-O-methoxyethyl adenosine
  modified_base 13: mod_base = OTHER; note = 2'-deoxy 5-methylcytidine
  modified_base 16: mod_base = OTHER; note = 2'-O-methoxyethyl adenosine
  modified_base 17: mod_base = OTHER; note = 2'-O-methoxyethyl guanosine
  modified_base 18: mod_base = OTHER; note = 2'-O-methoxyethyl thymidine
  modified_base 19: mod_base = OTHER; note = 2'-O-methoxyethyl guanosine
  modified_base 20: mod_base = OTHER; note = 2'-O-methoxyethyl 5-methylcytidine
  misc_feature 1..5: note = RNA
  misc_feature 6..9: note = DNA
  misc_feature 10: note = RNA
  misc_feature 11..15: note = DNA
  misc_feature 16..20: note = RNA
gcagaggtgaagcgaagtgc

SEQ ID NO: 159 - DNA, 20 bp, synthetic construct
  source 1..20: mol_type = other DNA
  modified_base 1: mod_base = OTHER; note = 2'-O-methoxyethyl guanosine
  modified_base 2: mod_base = OTHER; note = 2'-O-methoxyethyl 5-methylcytidine
  modified_base 3: mod_base = OTHER; note = 2'-O-methoxyethyl adenosine
  modified_base 4: mod_base = OTHER; note = 2'-O-methoxyethyl guanosine
  modified_base 5: mod_base = OTHER; note = 2'-O-methoxyethyl adenosine
  modified_base 10: mod_base = OTHER; note = 2'-O-methyl adenosine
  modified_base 13: mod_base = OTHER; note = 2'-deoxy 5-methylcytidine
  modified_base 16: mod_base = OTHER; note = 2'-O-methoxyethyl adenosine
  modified_base 17: mod_base = OTHER; note = 2'-O-methoxyethyl guanosine
  modified_base 18: mod_base = OTHER; note = 2'-O-methoxyethyl thymidine
  modified_base 19: mod_base = OTHER; note = 2'-O-methoxyethyl guanosine
  modified_base 20: mod_base = OTHER; note = 2'-O-methoxyethyl 5-methylcytidine
  misc_feature 1..5: note = RNA
  misc_feature 6..9: note = DNA
  misc_feature 10: note = RNA
  misc_feature 11..15: note = DNA
  misc_feature 16..20: note = RNA
gcagaggtgaagcgaagtgc

SEQ ID NO: 160 - DNA, 19 bp, synthetic construct
  source 1..19: mol_type = other DNA
  modified_base 1: mod_base = OTHER; note = 2'-O-methoxyethyl guanosine
  modified_base 2: mod_base = OTHER; note = 2'-O-methoxyethyl 5-methylcytidine
  modified_base 3: mod_base = OTHER; note = 2'-O-methoxyethyl adenosine
  modified_base 4: mod_base = OTHER; note = 2'-O-methoxyethyl guanosine
  modified_base 9: mod_base = OTHER; note = 2'-O-methoxyethyl adenosine
  modified_base 12: mod_base = OTHER; note = 2'-deoxy 5-methylcytidine
  modified_base 15: mod_base = OTHER; note = 2'-O-methoxyethyl adenosine
  modified_base 16: mod_base = OTHER; note = 2'-O-methoxyethyl guanosine
  modified_base 17: mod_base = OTHER; note = 2'-O-methoxyethyl thymidine
  modified_base 18: mod_base = OTHER; note = 2'-O-methoxyethyl guanosine
  modified_base 19: mod_base = OTHER; note = 2'-O-methoxyethyl 5-methylcytidine
  misc_feature 1..4: note = RNA
  misc_feature 5..8: note = DNA
  misc_feature 9: note = RNA
  misc_feature 10..14: note = DNA
  misc_feature 15..19: note = RNA
gcagagtgaagcgaagtgc

SEQ ID NO: 161 - DNA, 20 bp, synthetic construct
  source 1..20: mol_type = other DNA
  modified_base 1: mod_base = OTHER; note = 2'-O-methoxyethyl guanosine
  modified_base 2: mod_base = OTHER; note = 2'-O-methoxyethyl 5-methylcytidine
  modified_base 3: mod_base = OTHER; note = 2'-O-methoxyethyl adenosine
  modified_base 10: mod_base = OTHER; note = 2'-O-methoxyethyl adenosine
  modified_base 13: mod_base = OTHER; note = 2'-deoxy 5-methylcytidine
  modified_base 16: mod_base = OTHER; note = 2'-O-methoxyethyl adenosine
  modified_base 17: mod_base = OTHER; note = 2'-O-methoxyethyl guanosine
  modified_base 18: mod_base = OTHER; note = 2'-O-methoxyethyl thymidine
  modified_base 19: mod_base = OTHER; note = 2'-O-methoxyethyl guanosine
  modified_base 20: mod_base = OTHER; note = 2'-O-methoxyethyl 5-methylcytidine
  misc_feature 1..3: note = RNA
  misc_feature 4..9: note = DNA
  misc_feature 10: note = RNA
  misc_feature 11..15: note = DNA
  misc_feature 16..20: note = RNA
gcagaggtgaagcgaagtgc

SEQ ID NO: 162 - DNA, 20 bp, synthetic construct
  source 1..20: mol_type = other DNA
  modified_base 1: mod_base = OTHER; note = 2'-O-methoxyethyl guanosine
  modified_base 2: mod_base = OTHER; note = 2'-O-methoxyethyl 5-methylcytidine
  modified_base 3: mod_base = OTHER; note = 2'-O-methoxyethyl adenosine
  modified_base 4: mod_base = OTHER; note = 2'-O-methoxyethyl guanosine
  modified_base 5: mod_base = OTHER; note = 2'-O-methoxyethyl adenosine
  modified_base 13: mod_base = OTHER; note = 2'-deoxy 5-methylcytidine
  modified_base 16: mod_base = OTHER; note = 2'-O-methoxyethyl adenosine
  modified_base 17: mod_base = OTHER; note = 2'-O-methoxyethyl guanosine
  modified_base 18: mod_base = OTHER; note = 2'-O-methoxyethyl uridine
  modified_base 19: mod_base = OTHER; note = 2'-O-methoxyethyl guanosine
  modified_base 20: mod_base = OTHER; note = 2'-O-methoxyethyl 5-methylcytidine
  misc_feature 1..5: note = RNA
  misc_feature 6..15: note = DNA
  misc_feature 16..20: note = RNA
gcagaggtgaagcgaagtgc

SEQ ID NO: 163 - DNA, 20 bp, synthetic construct
  source 1..20: mol_type = other DNA
  modified_base 1: mod_base = OTHER; note = 2'-O-methoxyethyl guanosine
  modified_base 2: mod_base = OTHER; note = 2'-O-methoxyethyl 5-methylcytidine
  modified_base 3: mod_base = OTHER; note = 2'-O-methoxyethyl adenosine
  modified_base 4: mod_base = OTHER; note = 2'-O-methoxyethyl guanosine
  modified_base 5: mod_base = OTHER; note = 2'-O-methoxyethyl adenosine
  modified_base 10: mod_base = OTHER; note = 2'-O-methoxyethyl adenosine
  modified_base 13: mod_base = OTHER; note = 2'-deoxy 5-methylcytidine
  modified_base 16: mod_base = OTHER; note = 2'-O-methoxyethyl adenosine
  modified_base 17: mod_base = OTHER; note = 2'-O-methoxyethyl guanosine
  modified_base 18: mod_base = OTHER; note = 2'-O-methoxyethyl uridine
  modified_base 19: mod_base = OTHER; note = 2'-O-methoxyethyl guanosine
  modified_base 20: mod_base = OTHER; note = 2'-O-methoxyethyl 5-methylcytidine
  misc_feature 1..5: note = RNA
  misc_feature 6..9: note = DNA
  misc_feature 10: note = RNA
  misc_feature 11..15: note = DNA
  misc_feature 16..20: note = RNA
gcagaggtgaagcgaagtgc

SEQ ID NO: 164 - DNA, 20 bp, synthetic construct
  source 1..20: mol_type = other DNA
  modified_base 1: mod_base = OTHER; note = 2'-O-methoxyethyl guanosine
  modified_base 2: mod_base = OTHER; note = 2'-O-methoxyethyl 5-methylcytidine
  modified_base 3: mod_base = OTHER; note = 2'-O-methoxyethyl adenosine
  modified_base 4: mod_base = OTHER; note = 2'-O-methoxyethyl guanosine
  modified_base 5: mod_base = OTHER; note = 2'-O-methoxyethyl adenosine
  modified_base 6: mod_base = OTHER; note = 2'-O-methoxyethyl guanosine
  modified_base 13: mod_base = OTHER; note = 2'-deoxy 5-methylcytidine
  modified_base 16: mod_base = OTHER; note = 2'-O-methoxyethyl adenosine
  modified_base 17: mod_base = OTHER; note = 2'-O-methoxyethyl guanosine
  modified_base 18: mod_base = OTHER; note = 2'-O-methoxyethyl uridine
  modified_base 19: mod_base = OTHER; note = 2'-O-methoxyethyl guanosine
  modified_base 20: mod_base = OTHER; note = 2'-O-methoxyethyl 5-methylcytidine
  misc_feature 1..6: note = RNA
  misc_feature 7..15: note = DNA
  misc_feature 16..20: note = RNA
gcagaggtgaagcgaagtgc

SEQ ID NO: 165 - DNA, 20 bp, synthetic construct
  source 1..20: mol_type = other DNA
  modified_base 1: mod_base = OTHER; note = 2'-O-methoxyethyl guanosine
  modified_base 2: mod_base = OTHER; note = 2'-O-methoxyethyl 5-methylcytidine
  modified_base 3: mod_base = OTHER; note = 2'-O-methoxyethyl adenosine
  modified_base 4: mod_base = OTHER; note = 2'-O-methoxyethyl guanosine
  modified_base 5: mod_base = OTHER; note = 2'-O-methoxyethyl adenosine
  modified_base 7: mod_base = OTHER; note = 2'-O-methoxyethyl guanosine
  modified_base 13: mod_base = OTHER; note = 2'-deoxy 5-methylcytidine
  modified_base 16: mod_base = OTHER; note = 2'-O-methoxyethyl adenosine
  modified_base 17: mod_base = OTHER; note = 2'-O-methoxyethyl guanosine
  modified_base 18: mod_base = OTHER; note = 2'-O-methoxyethyl uridine
  modified_base 19: mod_base = OTHER; note = 2'-O-methoxyethyl guanosine
  modified_base 20: mod_base = OTHER; note = 2'-O-methoxyethyl 5-methylcytidine
  misc_feature 1..5: note = RNA
  misc_feature 6: note = DNA
  misc_feature 7: note = RNA
  misc_feature 8..15: note = DNA
  misc_feature 16..20: note = RNA
gcagaggtgaagcgaagtgc

SEQ ID NO: 166 - DNA, 20 bp, synthetic construct
  source 1..20: mol_type = other DNA
  modified_base 1: mod_base = OTHER; note = 2'-O-methoxyethyl guanosine
  modified_base 2: mod_base = OTHER; note = 2'-O-methoxyethyl 5-methylcytidine
  modified_base 3: mod_base = OTHER; note = 2'-O-methoxyethyl adenosine
  modified_base 4: mod_base = OTHER; note = 2'-O-methoxyethyl guanosine
  modified_base 5: mod_base = OTHER; note = 2'-O-methoxyethyl adenosine
  modified_base 8: mod_base = OTHER; note = 2'-O-methoxyethyl uridine
  modified_base 13: mod_base = OTHER; note = 2'-deoxy 5-methylcytidine
  modified_base 16: mod_base = OTHER; note = 2'-O-methoxyethyl adenosine
  modified_base 17: mod_base = OTHER; note = 2'-O-methoxyethyl guanosine
  modified_base 18: mod_base = OTHER; note = 2'-O-methoxyethyl uridine
  modified_base 19: mod_base = OTHER; note = 2'-O-methoxyethyl guanosine
  modified_base 20: mod_base = OTHER; note = 2'-O-methoxyethyl 5-methylcytidine
  misc_feature 1..5: note = RNA
  misc_feature 6..7: note = DNA
  misc_feature 8: note = RNA
  misc_feature 9..15: note = DNA
  misc_feature 16..20: note = RNA
gcagaggtgaagcgaagtgc

SEQ ID NO: 167 - DNA, 20 bp, synthetic construct
  source 1..20: mol_type = other DNA
  modified_base 1: mod_base = OTHER; note = 2'-O-methoxyethyl guanosine
  modified_base 2: mod_base = OTHER; note = 2'-O-methoxyethyl 5-methylcytidine
  modified_base 3: mod_base = OTHER; note = 2'-O-methoxyethyl adenosine
  modified_base 4: mod_base = OTHER; note = 2'-O-methoxyethyl guanosine
  modified_base 5: mod_base = OTHER; note = 2'-O-methoxyethyl adenosine
  modified_base 9: mod_base = OTHER; note = 2'-O-methoxyethyl guanosine
  modified_base 13: mod_base = OTHER; note = 2'-deoxy 5-methylcytidine
  modified_base 16: mod_base = OTHER; note = 2'-O-methoxyethyl adenosine
  modified_base 17: mod_base = OTHER; note = 2'-O-methoxyethyl guanosine
  modified_base 18: mod_base = OTHER; note = 2'-O-methoxyethyl uridine
  modified_base 19: mod_base = OTHER; note = 2'-O-methoxyethyl guanosine
  modified_base 20: mod_base = OTHER; note = 2'-O-methoxyethyl 5-methylcytidine
  misc_feature 1..5: note = RNA
  misc_feature 6..8: note = DNA
  misc_feature 9: note = RNA
  misc_feature 10..15: note = DNA
  misc_feature 16..20: note = RNA
gcagaggtgaagcgaagtgc

SEQ ID NO: 168 - DNA, 20 bp, synthetic construct
  source 1..20: mol_type = other DNA
  modified_base 1: mod_base = OTHER; note = 2'-O-methoxyethyl guanosine
  modified_base 2: mod_base = OTHER; note = 2'-O-methoxyethyl 5-methylcytidine
  modified_base 3: mod_base = OTHER; note = 2'-O-methoxyethyl adenosine
  modified_base 4: mod_base = OTHER; note = 2'-O-methoxyethyl guanosine
  modified_base 5: mod_base = OTHER; note = 2'-O-methoxyethyl adenosine
  modified_base 11: mod_base = OTHER; note = 2'-O-methoxyethyl adenosine
  modified_base 13: mod_base = OTHER; note = 2'-deoxy 5-methylcytidine
  modified_base 16: mod_base = OTHER; note = 2'-O-methoxyethyl adenosine
  modified_base 17: mod_base = OTHER; note = 2'-O-methoxyethyl guanosine
  modified_base 18: mod_base = OTHER; note = 2'-O-methoxyethyl uridine
  modified_base 19: mod_base = OTHER; note = 2'-O-methoxyethyl guanosine
  modified_base 20: mod_base = OTHER; note = 2'-O-methoxyethyl 5-methylcytidine
  misc_feature 1..5: note = RNA
  misc_feature 6..10: note = DNA
  misc_feature 11: note = RNA
  misc_feature 12..15: note = DNA
  misc_feature 16..20: note = RNA
gcagaggtgaagcgaagtgc

SEQ ID NO: 169 - DNA, 20 bp, synthetic construct
  source 1..20: mol_type = other DNA
  modified_base 1: mod_base = OTHER; note = 2'-O-methoxyethyl guanosine
  modified_base 2: mod_base = OTHER; note = 2'-O-methoxyethyl 5-methylcytidine
  modified_base 3: mod_base = OTHER; note = 2'-O-methoxyethyl adenosine
  modified_base 4: mod_base = OTHER; note = 2'-O-methoxyethyl guanosine
  modified_base 5: mod_base = OTHER; note = 2'-O-methoxyethyl adenosine
  modified_base 12: mod_base = OTHER; note = 2'-O-methoxyethyl guanosine
  modified_base 13: mod_base = OTHER; note = 2'-deoxy 5-methylcytidine
  modified_base 16: mod_base = OTHER; note = 2'-O-methoxyethyl adenosine
  modified_base 17: mod_base = OTHER; note = 2'-O-methoxyethyl guanosine
  modified_base 18: mod_base = OTHER; note = 2'-O-methoxyethyl uridine
  modified_base 19: mod_base = OTHER; note = 2'-O-methoxyethyl guanosine
  modified_base 20: mod_base = OTHER; note = 2'-O-methoxyethyl 5-methylcytidine
  misc_feature 1..5: note = RNA
  misc_feature 6..11: note = DNA
  misc_feature 12: note = RNA
  misc_feature 13..15: note = DNA
  misc_feature 16..20: note = RNA
gcagaggtgaagcgaagtgc

SEQ ID NO: 170 - DNA, 20 bp, synthetic construct
  source 1..20: mol_type = other DNA
  modified_base 1: mod_base = OTHER; note = 2'-O-methoxyethyl guanosine
  modified_base 2: mod_base = OTHER; note = 2'-O-methoxyethyl 5-methylcytidine
  modified_base 3: mod_base = OTHER; note = 2'-O-methoxyethyl adenosine
  modified_base 4: mod_base = OTHER; note = 2'-O-methoxyethyl guanosine
  modified_base 5: mod_base = OTHER; note = 2'-O-methoxyethyl adenosine
  modified_base 13: mod_base = OTHER; note = 2'-O-methoxyethyl 5-methylcytidine
  modified_base 16: mod_base = OTHER; note = 2'-O-methoxyethyl adenosine
  modified_base 17: mod_base = OTHER; note = 2'-O-methoxyethyl guanosine
  modified_base 18: mod_base = OTHER; note = 2'-O-methoxyethyl uridine
  modified_base 19: mod_base = OTHER; note = 2'-O-methoxyethyl guanosine
  modified_base 20: mod_base = OTHER; note = 2'-O-methoxyethyl 5-methylcytidine
  misc_feature 1..5: note = RNA
  misc_feature 6..12: note = DNA
  misc_feature 13: note = RNA
  misc_feature 14..15: note = DNA
  misc_feature 16..20: note = RNA
gcagaggtgaagcgaagtgc

SEQ ID NO: 171 - DNA, 20 bp, synthetic construct
  source 1..20: mol_type = other DNA
  modified_base 1: mod_base = OTHER; note = 2'-O-methoxyethyl guanosine
  modified_base 2: mod_base = OTHER; note = 2'-O-methoxyethyl 5-methylcytidine
  modified_base 3: mod_base = OTHER; note = 2'-O-methoxyethyl adenosine
  modified_base 4: mod_base = OTHER; note = 2'-O-methoxyethyl guanosine
  modified_base 5: mod_base = OTHER; note = 2'-O-methoxyethyl adenosine
  modified_base 13: mod_base = OTHER; note = 2'-deoxy 5-methylcytidine
  modified_base 14: mod_base = OTHER; note = 2'-O-methoxyethyl guanosine
  modified_base 16: mod_base = OTHER; note = 2'-O-methoxyethyl adenosine
  modified_base 17: mod_base = OTHER; note = 2'-O-methoxyethyl guanosine
  modified_base 18: mod_base = OTHER; note = 2'-O-methoxyethyl uridine
  modified_base 19: mod_base = OTHER; note = 2'-O-methoxyethyl guanosine
  modified_base 20: mod_base = OTHER; note = 2'-O-methoxyethyl 5-methylcytidine
  misc_feature 1..5: note = RNA
  misc_feature 6..13: note = DNA
  misc_feature 14: note = RNA
  misc_feature 15: note = DNA
  misc_feature 16..20: note = RNA
gcagaggtgaagcgaagtgc

SEQ ID NO: 172 - DNA, 20 bp, synthetic construct
  source 1..20: mol_type = other DNA
  modified_base 1: mod_base = OTHER; note = 2'-O-methoxyethyl guanosine
  modified_base 2: mod_base = OTHER; note = 2'-O-methoxyethyl 5-methylcytidine
  modified_base 3: mod_base = OTHER; note = 2'-O-methoxyethyl adenosine
  modified_base 4: mod_base = OTHER; note = 2'-O-methoxyethyl guanosine
  modified_base 5: mod_base = OTHER; note = 2'-O-methoxyethyl adenosine
  modified_base 13: mod_base = OTHER; note = 2'-deoxy 5-methylcytidine
  modified_base 15: mod_base = OTHER; note = 2'-O-methoxyethyl adenosine
  modified_base 16: mod_base = OTHER; note = 2'-O-methoxyethyl adenosine
  modified_base 17: mod_base = OTHER; note = 2'-O-methoxyethyl guanosine
  modified_base 18: mod_base = OTHER; note = 2'-O-methoxyethyl uridine
  modified_base 19: mod_base = OTHER; note = 2'-O-methoxyethyl guanosine
  modified_base 20: mod_base = OTHER; note = 2'-O-methoxyethyl 5-methylcytidine
  misc_feature 1..5: note = RNA
  misc_feature 6..14: note = DNA
  misc_feature 15..20: note = RNA
gcagaggtgaagcgaagtgc

SEQ ID NO: 173 - DNA, 20 bp, synthetic construct
  source 1..20: mol_type = other DNA
  modified_base 1: mod_base = OTHER; note = 2'-O-methoxyethyl guanosine
  modified_base 2: mod_base = OTHER; note = 2'-O-methoxyethyl 5-methylcytidine
  modified_base 3: mod_base = OTHER; note = 2'-O-methoxyethyl adenosine
  modified_base 4: mod_base = OTHER; note = 2'-O-methoxyethyl guanosine
  modified_base 5: mod_base = OTHER; note = 2'-O-methoxyethyl adenosine
  modified_base 10: mod_base = OTHER; note = 2'-O-methoxyethyl adenosine
  modified_base 13: mod_base = OTHER; note = 2'-deoxy 5-methylcytidine
  modified_base 15: mod_base = OTHER; note = 2'-O-methoxyethyl adenosine
  modified_base 16: mod_base = OTHER; note = 2'-O-methoxyethyl adenosine
  modified_base 17: mod_base = OTHER; note = 2'-O-methoxyethyl guanosine
  modified_base 18: mod_base = OTHER; note = 2'-O-methoxyethyl uridine
  modified_base 19: mod_base = OTHER; note = 2'-O-methoxyethyl guanosine
  modified_base 20: mod_base = OTHER; note = 2'-O-methoxyethyl 5-methylcytidine
  misc_feature 1..5: note = RNA
  misc_feature 6..9: note = DNA
  misc_feature 10: note = RNA
  misc_feature 11..14: note = DNA
  misc_feature 15..20: note = RNA
gcagaggtgaagcgaagtgc

SEQ ID NO: 174 - DNA, 20 bp, synthetic construct
  source 1..20: mol_type = other DNA
  modified_base 1: mod_base = OTHER; note = 2'-O-methoxyethyl guanosine
  modified_base 2: mod_base = OTHER; note = 2'-O-methoxyethyl 5-methylcytidine
  modified_base 3: mod_base = OTHER; note = 2'-O-methoxyethyl adenosine
  modified_base 4: mod_base = OTHER; note = 2'-O-methoxyethyl guanosine
  modified_base 5: mod_base = OTHER; note = 2'-O-methoxyethyl adenosine
  modified_base 6: mod_base = OTHER; note = 2'-O-methoxyethyl guanosine
  modified_base 11: mod_base = OTHER; note = 2'-O-methoxyethyl adenosine
  modified_base 13: mod_base = OTHER; note = 2'-deoxy 5-methylcytidine
  modified_base 16: mod_base = OTHER; note = 2'-O-methoxyethyl adenosine
  modified_base 17: mod_base = OTHER; note = 2'-O-methoxyethyl guanosine
  modified_base 18: mod_base = OTHER; note = 2'-O-methoxyethyl uridine
  modified_base 19: mod_base = OTHER; note = 2'-O-methoxyethyl guanosine
  modified_base 20: mod_base = OTHER; note = 2'-O-methoxyethyl 5-methylcytidine
  misc_feature 1..6: note = RNA
  misc_feature 7..10: note = DNA
  misc_feature 11: note = RNA
  misc_feature 12..15: note = DNA
  misc_feature 16..20: note = RNA
gcagaggtgaagcgaagtgc

SEQ ID NO: 175 - DNA, 20 bp, synthetic construct
  source 1..20: mol_type = other DNA
  modified_base 1: mod_base = OTHER; note = 2'-O-methoxyethyl guanosine
  modified_base 2: mod_base = OTHER; note = 2'-O-methoxyethyl 5-methylcytidine
  modified_base 3: mod_base = OTHER; note = 2'-O-methoxyethyl adenosine
  modified_base 4: mod_base = OTHER; note = 2'-O-methoxyethyl guanosine
  modified_base 5: mod_base = OTHER; note = 2'-O-methoxyethyl adenosine
  modified_base 10: mod_base = OTHER; note = 2'-O-methoxyethyl adenosine
  modified_base 13: mod_base = OTHER; note = 2'-deoxy 5-methylcytidine
  modified_base 16: mod_base = OTHER; note = 2'-O-methoxyethyl adenosine
  modified_base 17: mod_base = OTHER; note = 2'-O-methoxyethyl guanosine
  modified_base 18: mod_base = OTHER; note = 2'-O-methoxyethyl uridine
  modified_base 19: mod_base = OTHER; note = 2'-O-methoxyethyl guanosine
  modified_base 20: mod_base = OTHER; note = 2'-O-methoxyethyl 5-methylcytidine
  misc_feature 1..5: note = RNA
  misc_feature 6..9: note = DNA
  misc_feature 10: note = RNA
  misc_feature 11..15: note = DNA
  misc_feature 16..20: note = RNA
gcagaggtgaagcgaagtgc

SEQ ID NO: 176 - DNA, 20 bp, synthetic construct
  source 1..20: mol_type = other DNA
  modified_base 1: mod_base = OTHER; note = 2'-O-methoxyethyl guanosine
  modified_base 2: mod_base = OTHER; note = 2'-O-methoxyethyl 5-methylcytidine
  modified_base 3: mod_base = OTHER; note = 2'-O-methoxyethyl adenosine
  modified_base 4: mod_base = OTHER; note = 2'-O-methoxyethyl guanosine
  modified_base 5: mod_base = OTHER; note = 2'-O-methoxyethyl adenosine
  modified_base 11: mod_base = OTHER; note = 2'-O-methoxyethyl adenosine
  modified_base 13: mod_base = OTHER; note = 2'-deoxy 5-methylcytidine
  modified_base 16: mod_base = OTHER; note = 2'-O-methoxyethyl adenosine
  modified_base 17: mod_base = OTHER; note = 2'-O-methoxyethyl guanosine
  modified_base 18: mod_base = OTHER; note = 2'-O-methoxyethyl uridine
  modified_base 19: mod_base = OTHER; note = 2'-O-methoxyethyl guanosine
  modified_base 20: mod_base = OTHER; note = 2'-O-methoxyethyl 5-methylcytidine
  misc_feature 1..5: note = RNA
  misc_feature 6..10: note = DNA
  misc_feature 11: note = RNA
  misc_feature 12..15: note = DNA
  misc_feature 16..20: note = RNA
gcagaggtgaagcgaagtgc

SEQ ID NO: 177 - DNA, 20 bp, synthetic construct
  source 1..20: mol_type = other DNA
  modified_base 1: mod_base = OTHER; note = 2'-O-methoxyethyl guanosine
  modified_base 2: mod_base = OTHER; note = 2'-O-methoxyethyl 5-methylcytidine
  modified_base 3: mod_base = OTHER; note = 2'-O-methoxyethyl adenosine
  modified_base 4: mod_base = OTHER; note = 2'-O-methoxyethyl guanosine
  modified_base 5: mod_base = OTHER; note = 2'-O-methoxyethyl adenosine
  modified_base 10: mod_base = OTHER; note = 2'-O-methoxyethyl adenosine
  modified_base 13: mod_base = OTHER; note = 2'-deoxy 5-methylcytidine
  modified_base 15: mod_base = OTHER; note = 2'-O-methoxyethyl adenosine
  modified_base 16: mod_base = OTHER; note = 2'-O-methoxyethyl adenosine
  modified_base 17: mod_base = OTHER; note = 2'-O-methoxyethyl guanosine
  modified_base 18: mod_base = OTHER; note = 2'-O-methoxyethyl uridine
  modified_base 19: mod_base = OTHER; note = 2'-O-methoxyethyl guanosine
  modified_base 20: mod_base = OTHER; note = 2'-O-methoxyethyl 5-methylcytidine
  misc_feature 1..5: note = RNA
  misc_feature 6..9: note = DNA
  misc_feature 10: note = RNA
  misc_feature 11..14: note = DNA
  misc_feature 15..20: note = RNA
gcagaggtgaagcgaagtgc

SEQ ID NO: 178 - DNA, 20 bp, synthetic construct
  source 1..20: mol_type = other DNA
  modified_base 1: mod_base = OTHER; note = 2'-O-methoxyethyl guanosine
  modified_base 2: mod_base = OTHER; note = 2'-O-methoxyethyl 5-methylcytidine
  modified_base 3: mod_base = OTHER; note = 2'-O-methoxyethyl adenosine
  modified_base 4: mod_base = OTHER; note = 2'-O-methoxyethyl guanosine
  modified_base 5: mod_base = OTHER; note = 2'-O-methoxyethyl adenosine
  modified_base 16: mod_base = OTHER; note = 2'-O-methoxyethyl adenosine
  modified_base 17: mod_base = OTHER; note = 2'-O-methoxyethyl guanosine
  modified_base 18: mod_base = OTHER; note = 2'-O-methoxyethyl uridine
  modified_base 19: mod_base = OTHER; note = 2'-O-methoxyethyl guanosine
  modified_base 20: mod_base = OTHER; note = 2'-O-methoxyethyl 5-methylcytidine
  misc_feature 1..5: note = RNA
  misc_feature 6..15: note = DNA
  misc_feature 16..20: note = RNA
gcagaggtgaagtgaagtgc

SEQ ID NO: 179 - DNA, 20 bp, synthetic construct
  source 1..20: mol_type = other DNA
  modified_base 1: mod_base = OTHER; note = 2'-O-methoxyethyl guanosine
  modified_base 2: mod_base = OTHER; note = 2'-O-methoxyethyl 5-methylcytidine
  modified_base 3: mod_base = OTHER; note = 2'-O-methoxyethyl adenosine
  modified_base 4: mod_base = OTHER; note = 2'-O-methoxyethyl guanosine
  modified_base 5: mod_base = OTHER; note = 2'-O-methoxyethyl adenosine
  modified_base 10: mod_base = OTHER; note = 2'-O-methoxyethyl adenosine
  modified_base 16: mod_base = OTHER; note = 2'-O-methoxyethyl adenosine
  modified_base 17: mod_base = OTHER; note = 2'-O-methoxyethyl guanosine
  modified_base 18: mod_base = OTHER; note = 2'-O-methoxyethyl uridine
  modified_base 19: mod_base = OTHER; note = 2'-O-methoxyethyl guanosine
  modified_base 20: mod_base = OTHER; note = 2'-O-methoxyethyl 5-methylcytidine
  misc_feature 1..5: note = RNA
  misc_feature 6..9: note = DNA
  misc_feature 10: note = RNA
  misc_feature 11..15: note = DNA
  misc_feature 16..20: note = RNA
gcagaggtgaagtgaagtgc

SEQ ID NO: 180 - DNA, 40 bp, synthetic construct; identical to SEQ ID NO: 11
  source 1..40: mol_type = other DNA
  modified_base 1: mod_base = OTHER; note = 2'-O-methyl 5-methylcytidine
  modified_base 2: mod_base = OTHER; note = 2'-O-methyl adenosine
  modified_base 3: mod_base = OTHER; note = 2'-O-methyl adenosine
  modified_base 4: mod_base = OTHER; note = 2'-O-methyl adenosine
  modified_base 5: mod_base = OTHER; note = 2'-O-methyl 5-methylcytidine
  modified_base 6: mod_base = OTHER; note = 2'-O-methyl adenosine
  modified_base 7: mod_base = OTHER; note = 2'-O-methyl adenosine
  modified_base 8: mod_base = OTHER; note = 2'-O-methyl 5-methylcytidine
  modified_base 9: mod_base = OTHER; note = 2'-O-methyl adenosine
  modified_base 10: mod_base = OTHER; note = 2'-O-methyl adenosine
  modified_base 11: mod_base = OTHER; note = 2'-O-methyl guanosine
  modified_base 12: mod_base = OTHER; note = 2'-O-methyl 5-methylcytidine
  modified_base 13: mod_base = OTHER; note = 2'-O-methyl adenosine
  modified_base 14: mod_base = OTHER; note = 2'-O-methyl guanosine
  modified_base 15: mod_base = OTHER; note = 2'-O-methyl adenosine
  modified_base 23: mod_base = OTHER; note = 2'-deoxy cytidine
  modified_base 26: mod_base = OTHER; note = 2'-O-methyl adenosine
  modified_base 27: mod_base = OTHER; note = 2'-O-methyl guanosine
  modified_base 28: mod_base = OTHER; note = 2'-O-methyl thymidine
  modified_base 29: mod_base = OTHER; note = 2'-O-methyl guanosine
  modified_base 30: mod_base = OTHER; note = 2'-O-methyl 5-methylcytidine
  modified_base 31: mod_base = OTHER; note = 2'-O-methyl 5-methylcytidine
  modified_base 32: mod_base = OTHER; note = 2'-O-methyl adenosine
  modified_base 33: mod_base = OTHER; note = 2'-O-methyl adenosine
  modified_base 34: mod_base = OTHER; note = 2'-O-methyl 5-methylcytidine
  modified_base 35: mod_base = OTHER; note = 2'-O-methyl adenosine
  modified_base 36: mod_base = OTHER; note = 2'-O-methyl adenosine
  modified_base 37: mod_base = OTHER; note = 2'-O-methyl 5-methylcytidine
  modified_base 38: mod_base = OTHER; note = 2'-O-methyl adenosine
  modified_base 39: mod_base = OTHER; note = 2'-O-methyl adenosine
  modified_base 40: mod_base = OTHER; note = 2'-O-methyl adenosine
  misc_feature 1..15: note = RNA
  misc_feature 16..25: note = DNA
  misc_feature 26..40: note = RNA

SEQ ID NO: 181 - DNA, 40 bp, synthetic construct
  source 1..40: mol_type = other DNA
  modified_base 1: mod_base = OTHER; note = 2'-O-methoxyethyl adenosine
  modified_base 2: mod_base = OTHER; note = 2'-O-methoxyethyl adenosine
  modified_base 3: mod_base = OTHER; note = 2'-O-methoxyethyl adenosine
  modified_base 4: mod_base = OTHER; note = 2'-O-methoxyethyl 5-methylcytidine
  modified_base 5: mod_base = OTHER; note = 2'-O-methoxyethyl adenosine
  modified_base 6: mod_base = OTHER; note = 2'-O-methoxyethyl adenosine
  modified_base 7: mod_base = OTHER; note = 2'-O-methoxyethyl 5-methylcytidine
  modified_base 8: mod_base = OTHER; note = 2'-O-methoxyethyl adenosine
  modified_base 9: mod_base = OTHER; note = 2'-O-methoxyethyl adenosine
  modified_base 10: mod_base = OTHER; note = 2'-O-methoxyethyl adenosine
  modified_base 11: mod_base = OTHER; note = 2'-O-methoxyethyl guanosine
  modified_base 12: mod_base = OTHER; note = 2'-O-methoxyethyl 5-methylcytidine
  modified_base 13: mod_base = OTHER; note = 2'-O-methoxyethyl adenosine
  modified_base 14: mod_base = OTHER; note = 2'-O-methoxyethyl guanosine
  modified_base 15: mod_base = OTHER; note = 2'-O-methoxyethyl adenosine
  modified_base 23: mod_base = OTHER; note = 2'-deoxy 5-methylcytidine
  modified_base 26: mod_base = OTHER; note = 2'-O-methoxyethyl adenosine
  modified_base 27: mod_base = OTHER; note = 2'-O-methoxyethyl guanosine
  modified_base 28: mod_base = OTHER; note = 2'-O-methoxyethyl thymidine
  modified_base 29: mod_base = OTHER; note = 2'-O-methoxyethyl guanosine
  modified_base 30: mod_base = OTHER; note = 2'-O-methoxyethyl 5-methylcytidine
  modified_base 31: mod_base = OTHER; note = 2'-O-methoxyethyl adenosine
  modified_base 32: mod_base = OTHER; note = 2'-O-methoxyethyl adenosine
  modified_base 33: mod_base = OTHER; note = 2'-O-methoxyethyl adenosine
  modified_base 34: mod_base = OTHER; note = 2'-O-methoxyethyl 5-methylcytidine
  modified_base 35: mod_base = OTHER; note = 2'-O-methoxyethyl adenosine
  modified_base 36: mod_base = OTHER; note = 2'-O-methoxyethyl adenosine
  modified_base 37: mod_base = OTHER; note = 2'-O-methoxyethyl 5-methylcytidine
  modified_base 38: mod_base = OTHER; note = 2'-O-methoxyethyl adenosine
  modified_base 39: mod_base = OTHER; note = 2'-O-methoxyethyl adenosine
  modified_base 40: mod_base = OTHER; note = 2'-O-methoxyethyl adenosine
  misc_feature 1..15: note = RNA
  misc_feature 16..25: note = DNA
  misc_feature 26..40: note = RNA
aaacaacaaagcagaggtgaagcgaagtgcaaacaacaaa

SEQ ID NO: 182 - DNA, 40 bp, synthetic construct; identical to SEQ ID NO: 181
  source 1..40: mol_type = other DNA
  modified_base 1: mod_base = OTHER; note = 2'-O-methoxyethyl adenosine
  modified_base 2: mod_base = OTHER; note = 2'-O-methoxyethyl adenosine
  modified_base 3: mod_base = OTHER; note = 2'-O-methoxyethyl adenosine
  modified_base 4: mod_base = OTHER; note = 2'-O-methoxyethyl 5-methylcytidine
  modified_base 5: mod_base = OTHER; note = 2'-O-methoxyethyl adenosine
  modified_base 6: mod_base = OTHER; note = 2'-O-methoxyethyl adenosine
  modified_base 7: mod_base = OTHER; note = 2'-O-methoxyethyl 5-methylcytidine
  modified_base 8: mod_base = OTHER; note = 2'-O-methoxyethyl adenosine
  modified_base 9: mod_base = OTHER; note = 2'-O-methoxyethyl adenosine
  modified_base 10: mod_base = OTHER; note = 2'-O-methoxyethyl adenosine
  modified_base 12: mod_base = OTHER; note = 2'-deoxy 5-methylcytidine
  modified_base 23: mod_base = OTHER; note = 2'-deoxy 5-methylcytidine
  modified_base 30: mod_base = OTHER; note = 2'-deoxy 5-methylcytidine
  modified_base 31: mod_base = OTHER; note = 2'-O-methoxyethyl adenosine
  modified_base 32: mod_base = OTHER; note = 2'-O-methoxyethyl adenosine
  modified_base 33: mod_base = OTHER; note = 2'-O-methoxyethyl adenosine
  modified_base 34: mod_base = OTHER; note = 2'-O-methoxyethyl 5-methylcytidine
  modified_base 35: mod_base = OTHER; note = 2'-O-methoxyethyl adenosine
  modified_base 36: mod_base = OTHER; note = 2'-O-methoxyethyl adenosine
  modified_base 37: mod_base = OTHER; note = 2'-O-methoxyethyl 5-methylcytidine
  modified_base 38: mod_base = OTHER; note = 2'-O-methoxyethyl adenosine
  modified_base 39: mod_base = OTHER; note = 2'-O-methoxyethyl adenosine
  modified_base 40: mod_base = OTHER; note = 2'-O-methoxyethyl adenosine
  misc_feature 1..10: note = RNA
  misc_feature 11..30: note = DNA
  misc_feature 31..40: note = RNA

SEQ ID NO: 183 - DNA, 30 bp, synthetic construct
  source 1..30: mol_type = other DNA
  modified_base 1: mod_base = OTHER; note = 2'-O-methoxyethyl adenosine
  modified_base 2: mod_base = OTHER; note = 2'-O-methoxyethyl 5-methylcytidine
  modified_base 3: mod_base = OTHER; note = 2'-O-methoxyethyl adenosine
  modified_base 4: mod_base = OTHER; note = 2'-O-methoxyethyl adenosine
  modified_base 5: mod_base = OTHER; note = 2'-O-methoxyethyl adenosine
  modified_base 6: mod_base = OTHER; note = 2'-O-methoxyethyl guanosine
  modified_base 7: mod_base = OTHER; note = 2'-O-methoxyethyl 5-methylcytidine
  modified_base 8: mod_base = OTHER; note = 2'-O-methoxyethyl adenosine
  modified_base 9: mod_base = OTHER; note = 2'-O-methoxyethyl guanosine
  modified_base 10: mod_base = OTHER; note = 2'-O-methoxyethyl adenosine
  modified_base 18: mod_base = OTHER; note = 2'-deoxy 5-methylcytidine
  modified_base 21: mod_base = OTHER; note = 2'-O-methoxyethyl adenosine
  modified_base 22: mod_base = OTHER; note = 2'-O-methoxyethyl guanosine
  modified_base 23: mod_base = OTHER; note = 2'-O-methoxyethyl thymidine
  modified_base 24: mod_base = OTHER; note = 2'-O-methoxyethyl guanosine
  modified_base 25: mod_base = OTHER; note = 2'-O-methoxyethyl 5-methylcytidine
  modified_base 26: mod_base = OTHER; note = 2'-O-methoxyethyl adenosine
  modified_base 27: mod_base = OTHER; note = 2'-O-methoxyethyl adenosine
  modified_base 28: mod_base = OTHER; note = 2'-O-methoxyethyl adenosine
  modified_base 29: mod_base = OTHER; note = 2'-O-methoxyethyl 5-methylcytidine
  modified_base 30: mod_base = OTHER; note = 2'-O-methoxyethyl adenosine
  misc_feature 1..10: note = RNA
  misc_feature 11..20: note = DNA
  misc_feature 21..30: note = RNA
acaaagcagaggtgaagcgaagtgcaaaca

SEQ ID NO: 184 - DNA, 30 bp, synthetic construct; identical to SEQ ID NO: 183
  source 1..30: mol_type = other DNA
  modified_base 1: mod_base = OTHER; note = 2'-O-methoxyethyl adenosine
  modified_base 2: mod_base = OTHER; note = 2'-O-methoxyethyl 5-methylcytidine
  modified_base 3: mod_base = OTHER; note = 2'-O-methoxyethyl adenosine
  modified_base 4: mod_base = OTHER; note = 2'-O-methoxyethyl adenosine
  modified_base 5: mod_base = OTHER; note = 2'-O-methoxyethyl adenosine
  modified_base 7: mod_base = OTHER; note = 2'-deoxy 5-methylcytidine
  modified_base 18: mod_base = OTHER; note = 2'-deoxy 5-methylcytidine
  modified_base 25: mod_base = OTHER; note = 2'-deoxy 5-methylcytidine
  modified_base 26: mod_base = OTHER; note = 2'-O-methoxyethyl adenosine
  modified_base 27: mod_base = OTHER; note = 2'-O-methoxyethyl adenosine
  modified_base 28: mod_base = OTHER; note = 2'-O-methoxyethyl adenosine
  modified_base 29: mod_base = OTHER; note = 2'-O-methoxyethyl 5-methylcytidine
  modified_base 30: mod_base = OTHER; note = 2'-O-methoxyethyl adenosine
  misc_feature 1..5: note = RNA
  misc_feature 6..25: note = DNA
  misc_feature 26..30: note = RNA

SEQ ID NO: 185 - DNA, 40 bp, synthetic construct; identical to SEQ ID NO: 12
  source 1..40: mol_type = other DNA
  modified_base 1: mod_base = OTHER; note = 2'-O-methoxyethyl guanosine
  modified_base 2: mod_base = OTHER; note = 2'-O-methoxyethyl 5-methylcytidine
  modified_base 3: mod_base = OTHER; note = 2'-O-methoxyethyl adenosine
  modified_base 4: mod_base = OTHER; note = 2'-O-methoxyethyl guanosine
  modified_base 5: mod_base = OTHER; note = 2'-O-methoxyethyl adenosine
  modified_base 13: mod_base = OTHER; note = 2'-deoxy 5-methylcytidine
  modified_base 16: mod_base = OTHER; note = 2'-O-methoxyethyl adenosine
  modified_base 17: mod_base = OTHER; note = 2'-O-methoxyethyl guanosine
  modified_base 18: mod_base = OTHER; note = 2'-O-methoxyethyl thymidine
  modified_base 19: mod_base = OTHER; note = 2'-O-methoxyethyl guanosine
  modified_base 20: mod_base = OTHER; note = 2'-O-methoxyethyl 5-methylcytidine
  modified_base 21: mod_base = OTHER; note = 2'-O-methoxyethyl adenosine
  modified_base 22: mod_base = OTHER; note = 2'-O-methoxyethyl adenosine
  modified_base 23: mod_base = OTHER; note = 2'-O-methoxyethyl adenosine
  modified_base 24: mod_base = OTHER; note = 2'-O-methoxyethyl 5-methylcytidine
  modified_base 25: mod_base = OTHER; note = 2'-O-methoxyethyl adenosine
  modified_base 26: mod_base = OTHER; note = 2'-O-methoxyethyl adenosine
  modified_base 27: mod_base = OTHER; note = 2'-O-methoxyethyl 5-methylcytidine
  modified_base 28: mod_base = OTHER; note = 2'-O-methoxyethyl adenosine
  modified_base 29: mod_base = OTHER; note = 2'-O-methoxyethyl adenosine
  modified_base 30: mod_base = OTHER; note = 2'-O-methoxyethyl adenosine
  modified_base 31: mod_base = OTHER; note = 2'-O-methoxyethyl 5-methylcytidine
  modified_base 32: mod_base = OTHER; note = 2'-O-methoxyethyl adenosine
  modified_base 33: mod_base = OTHER; note = 2'-O-methoxyethyl adenosine
  modified_base 34: mod_base = OTHER; note = 2'-O-methoxyethyl 5-methylcytidine
  modified_base 35: mod_base = OTHER; note = 2'-O-methoxyethyl adenosine
  modified_base 36: mod_base = OTHER; note = 2'-O-methoxyethyl adenosine
  modified_base 37: mod_base = OTHER; note = 2'-O-methoxyethyl adenosine
  modified_base 38: mod_base = OTHER; note = 2'-O-methoxyethyl 5-methylcytidine
  modified_base 39: mod_base = OTHER; note = 2'-O-methoxyethyl adenosine
  modified_base 40: mod_base = OTHER; note = 2'-O-methoxyethyl adenosine
  misc_feature 1..5: note = RNA
  misc_feature 6..15: note = DNA
  misc_feature 16..40: note = RNA

SEQ ID NO: 186 - DNA, 30 bp, synthetic construct
  source 1..30: mol_type = other DNA
  modified_base 1: mod_base = OTHER; note = 2'-O-methoxyethyl guanosine
  modified_base 2: mod_base = OTHER; note = 2'-O-methoxyethyl 5-methylcytidine
  modified_base 3: mod_base = OTHER; note = 2'-O-methoxyethyl adenosine
  modified_base 4: mod_base = OTHER; note = 2'-O-methoxyethyl guanosine
  modified_base 5: mod_base = OTHER; note = 2'-O-methoxyethyl adenosine
  modified_base 13: mod_base = OTHER; note = 2'-deoxy 5-methylcytidine
  modified_base 16: mod_base = OTHER; note = 2'-O-methoxyethyl adenosine
  modified_base 17: mod_base = OTHER; note = 2'-O-methoxyethyl guanosine
  modified_base 18: mod_base = OTHER; note = 2'-O-methoxyethyl thymidine
  modified_base 19: mod_base = OTHER; note = 2'-O-methoxyethyl guanosine
  modified_base 20: mod_base = OTHER; note = 2'-O-methoxyethyl 5-methylcytidine
  modified_base 21: mod_base = OTHER; note = 2'-O-methoxyethyl adenosine
  modified_base 22: mod_base = OTHER; note = 2'-O-methoxyethyl adenosine
  modified_base 23: mod_base = OTHER; note = 2'-O-methoxyethyl adenosine
  modified_base 24: mod_base = OTHER; note = 2'-O-methoxyethyl 5-methylcytidine
  modified_base 25: mod_base = OTHER; note = 2'-O-methoxyethyl adenosine
  modified_base 26: mod_base = OTHER; note = 2'-O-methoxyethyl adenosine
  modified_base 27: mod_base = OTHER; note = 2'-O-methoxyethyl 5-methylcytidine
  modified_base 28: mod_base = OTHER; note = 2'-O-methoxyethyl adenosine
  modified_base 29: mod_base = OTHER; note = 2'-O-methoxyethyl adenosine
  modified_base 30: mod_base = OTHER; note = 2'-O-methoxyethyl adenosine
  misc_feature 1..5: note = RNA
  misc_feature 6..15: note = DNA
  misc_feature 16..30: note = RNA
gcagaggtgaagcgaagtgcaaacaacaaa

SEQ ID NO: 187 - DNA, 40 bp, synthetic construct
  source 1..40: mol_type = other DNA
  modified_base 1: mod_base = OTHER; note = 2'-O-methoxyethyl adenosine
  modified_base 2: mod_base = OTHER; note = 2'-O-methoxyethyl adenosine
  modified_base 3: mod_base = OTHER; note = 2'-O-methoxyethyl 5-methylcytidine
  modified_base 4: mod_base = OTHER; note = 2'-O-methoxyethyl adenosine
  modified_base 5: mod_base = OTHER; note = 2'-O-methoxyethyl adenosine
  modified_base 6: mod_base = OTHER; note = 2'-O-methoxyethyl adenosine
  modified_base 7: mod_base = OTHER; note = 2'-O-methoxyethyl 5-methylcytidine
  modified_base 8: mod_base = OTHER; note = 2'-O-methoxyethyl adenosine
  modified_base 9: mod_base = OTHER; note = 2'-O-methoxyethyl adenosine
  modified_base 10: mod_base = OTHER; note = 2'-O-methoxyethyl 5-methylcytidine
  modified_base 11: mod_base = OTHER; note = 2'-O-methoxyethyl adenosine
  modified_base 12: mod_base = OTHER; note = 2'-O-methoxyethyl adenosine
  modified_base 13: mod_base = OTHER; note = 2'-O-methoxyethyl adenosine
  modified_base 14: mod_base = OTHER; note = 2'-O-methoxyethyl 5-methylcytidine
  modified_base 15: mod_base = OTHER; note = 2'-O-methoxyethyl adenosine
  modified_base 16: mod_base = OTHER; note = 2'-O-methoxyethyl adenosine
  modified_base 17: mod_base = OTHER; note = 2'-O-methoxyethyl 5-methylcytidine
  modified_base 18: mod_base = OTHER; note = 2'-O-methoxyethyl adenosine
  modified_base 19: mod_base = OTHER; note = 2'-O-methoxyethyl adenosine
  modified_base 20: mod_base = OTHER; note = 2'-O-methoxyethyl adenosine
  modified_base 21: mod_base = OTHER; note = 2'-O-methoxyethyl guanosine
  modified_base 22: mod_base = OTHER; note = 2'-O-methoxyethyl 5-methylcytidine
  modified_base 23: mod_base = OTHER; note = 2'-O-methoxyethyl adenosine
  modified_base 24: mod_base = OTHER; note = 2'-O-methoxyethyl guanosine
  modified_base 25: mod_base = OTHER; note = 2'-O-methoxyethyl adenosine
  modified_base 33: mod_base = OTHER; note = 2'-deoxy 5-methylcytidine
  modified_base 36: mod_base = OTHER; note = 2'-O-methoxyethyl adenosine
  modified_base 37: mod_base = OTHER; note = 2'-O-methoxyethyl guanosine
  modified_base 38: mod_base = OTHER; note = 2'-O-methoxyethyl thymidine
  modified_base 39: mod_base = OTHER; note = 2'-O-methoxyethyl guanosine
  modified_base 40: mod_base = OTHER; note = 2'-O-methoxyethyl 5-methylcytidine
  misc_feature 1..25: note = RNA
  misc_feature 26..35: note = DNA
  misc_feature 36..40: note = RNA
aacaaacaacaaacaacaaagcagaggtgaagcgaagtgc

SEQ ID NO: 188 - DNA, 30 bp, synthetic construct
  source 1..30: mol_type = other DNA
  modified_base 1: mod_base = OTHER; note = 2'-O-methoxyethyl adenosine
  modified_base 2: mod_base = OTHER; note = 2'-O-methoxyethyl adenosine
  modified_base 3: mod_base = OTHER; note = 2'-O-methoxyethyl adenosine
  modified_base 4: mod_base = OTHER; note = 2'-O-methoxyethyl 5-methylcytidine
  modified_base 5: mod_base = OTHER; note = 2'-O-methoxyethyl adenosine
  modified_base 6: mod_base = OTHER; note = 2'-O-methoxyethyl adenosine
  modified_base 7: mod_base = OTHER; note = 2'-O-methoxyethyl 5-methylcytidine
  modified_base 8: mod_base = OTHER; note = 2'-O-methoxyethyl adenosine
  modified_base 9: mod_base = OTHER; note = 2'-O-methoxyethyl adenosine
  modified_base 10: mod_base = OTHER; note = 2'-O-methoxyethyl adenosine
  modified_base 11: mod_base = OTHER; note = 2'-O-methoxyethyl guanosine
  modified_base 12: mod_base = OTHER; note = 2'-O-methoxyethyl 5-methylcytidine
  modified_base 13: mod_base = OTHER; note = 2'-O-methoxyethyl adenosine
  modified_base 14: mod_base = OTHER; note = 2'-O-methoxyethyl guanosine
  modified_base 15: mod_base = OTHER; note = 2'-O-methoxyethyl adenosine
  modified_base 23: mod_base = OTHER; note = 2'-deoxy 5-methylcytidine
  modified_base 26: mod_base = OTHER; note = 2'-O-methoxyethyl adenosine
  modified_base 27: mod_base = OTHER; note = 2'-O-methoxyethyl guanosine
  modified_base 28: mod_base = OTHER; note = 2'-O-methoxyethyl thymidine
  modified_base 29: mod_base = OTHER; note = 2'-O-methoxyethyl guanosine
  modified_base 30: mod_base = OTHER; note = 2'-O-methoxyethyl 5-methylcytidine
  misc_feature 1..15: note = RNA
  misc_feature 16..25: note = DNA
  misc_feature 26..30: note = RNA
aaacaacaaagcagaggtgaagcgaagtgc

SEQ ID NO: 189 - DNA, 26 bp, synthetic construct
  source 1..26: mol_type = other DNA
  modified_base 1: mod_base = OTHER; note = 2'-O-methoxyethyl 5-methylcytidine
  modified_base 2: mod_base = OTHER; note = 2'-O-methoxyethyl guanosine
  modified_base 3: mod_base = OTHER; note = 2'-O-methoxyethyl thymidine
  modified_base 4: mod_base = OTHER; note = 2'-O-methoxyethyl guanosine
  modified_base 5: mod_base = OTHER; note = 2'-O-methoxyethyl 5-methylcytidine
  modified_base 6: mod_base = OTHER; note = 2'-O-methoxyethyl adenosine
  modified_base 7: mod_base = OTHER; note = 2'-O-methoxyethyl guanosine
  modified_base 8: mod_base = OTHER; note = 2'-O-methoxyethyl adenosine
  modified_base 16: mod_base = OTHER; note = 2'-deoxy 5-methylcytidine
  modified_base 19: mod_base = OTHER; note = 2'-O-methoxyethyl adenosine
  modified_base 20: mod_base = OTHER; note = 2'-O-methoxyethyl guanosine
  modified_base 21: mod_base = OTHER; note = 2'-O-methoxyethyl thymidine
  modified_base 22: mod_base = OTHER; note = 2'-O-methoxyethyl guanosine
  modified_base 23: mod_base = OTHER; note = 2'-O-methoxyethyl 5-methylcytidine
  modified_base 24: mod_base = OTHER; note = 2'-O-methoxyethyl adenosine
  modified_base 25: mod_base = OTHER; note = 2'-O-methoxyethyl 5-methylcytidine
  modified_base 26: mod_base = OTHER; note = 2'-O-methoxyethyl adenosine
  misc_feature 1..8: note = RNA
  misc_feature 9..18: note = DNA
  misc_feature 19..26: note = RNA
cgtgcagaggtgaagcgaagtgcaca

SEQ ID NO: 190 - DNA, 24 bp, synthetic construct
  source 1..24: mol_type = other DNA
  modified_base 1: mod_base = OTHER; note = 2'-O-methoxyethyl guanosine
  modified_base 2: mod_base = OTHER; note = 2'-O-methoxyethyl thymidine
  modified_base 3: mod_base = OTHER; note = 2'-O-methoxyethyl guanosine
  modified_base 4: mod_base = OTHER; note = 2'-O-methoxyethyl 5-methylcytidine
  modified_base 5: mod_base = OTHER; note = 2'-O-methoxyethyl adenosine
  modified_base 6: mod_base = OTHER; note = 2'-O-methoxyethyl guanosine
  modified_base 7: mod_base = OTHER; note = 2'-O-methoxyethyl adenosine
  modified_base 15: mod_base = OTHER; note = 2'-deoxy 5-methylcytidine
  modified_base 18: mod_base = OTHER; note = 2'-O-methoxyethyl adenosine
  modified_base 19: mod_base = OTHER; note = 2'-O-methoxyethyl guanosine
  modified_base 20: mod_base = OTHER; note = 2'-O-methoxyethyl thymidine
  modified_base 21: mod_base = OTHER; note = 2'-O-methoxyethyl guanosine
  modified_base 22: mod_base = OTHER; note = 2'-O-methoxyethyl 5-methylcytidine
  modified_base 23: mod_base = OTHER; note = 2'-O-methoxyethyl adenosine
  modified_base 24: mod_base = OTHER; note = 2'-O-methoxyethyl 5-methylcytidine
  misc_feature 1..7: note = RNA
  misc_feature 8..17: note = DNA
  misc_feature 18..24: note = RNA
gtgcagaggtgaagcgaagtgcac

SEQ ID NO: 191 - DNA, 22 bp, synthetic construct
  source 1..22: mol_type = other DNA
  modified_base 1: mod_base = OTHER; note = 2'-O-methoxyethyl thymidine
  modified_base 2: mod_base = OTHER; note = 2'-O-methoxyethyl guanosine
  modified_base 3: mod_base = OTHER; note = 2'-O-methoxyethyl 5-methylcytidine
  modified_base 4: mod_base = OTHER; note = 2'-O-methoxyethyl adenosine
  modified_base 5: mod_base = OTHER; note = 2'-O-methoxyethyl guanosine
  modified_base 6: mod_base = OTHER; note = 2'-O-methoxyethyl adenosine
  modified_base 14: mod_base = OTHER; note = 2'-deoxy 5-methylcytidine
  modified_base 17: mod_base = OTHER; note = 2'-O-methoxyethyl adenosine
  modified_base 18: mod_base = OTHER; note = 2'-O-methoxyethyl guanosine
  modified_base 19: mod_base = OTHER; note = 2'-O-methoxyethyl thymidine
  modified_base 20: mod_base = OTHER; note = 2'-O-methoxyethyl guanosine
  modified_base 21: mod_base = OTHER; note = 2'-O-methoxyethyl 5-methylcytidine
  modified_base 22: mod_base = OTHER; note = 2'-O-methoxyethyl adenosine
  misc_feature 1..6: note = RNA
  misc_feature 7..16: note = DNA
  misc_feature 17..22: note = RNA
tgcagaggtgaagcgaagtgca

SEQ ID NO: 192 - DNA, 18 bp, synthetic construct
  source 1..18: mol_type = other DNA
  modified_base 1: mod_base = OTHER; note = 2'-O-methoxyethyl 5-methylcytidine
  modified_base 2: mod_base = OTHER; note = 2'-O-methoxyethyl adenosine
  modified_base 3: mod_base = OTHER; note = 2'-O-methoxyethyl guanosine
  modified_base 4: mod_base = OTHER; note = 2'-O-methoxyethyl adenosine
  modified_base 12: mod_base = OTHER; note = 2'-deoxy 5-methylcytidine
  modified_base 15: mod_base = OTHER; note = 2'-O-methoxyethyl adenosine
  modified_base 16: mod_base = OTHER; note = 2'-O-methoxyethyl guanosine
  modified_base 17: mod_base = OTHER; note = 2'-O-methoxyethyl thymidine
  modified_base 18: mod_base = OTHER; note = 2'-O-methoxyethyl guanosine
  misc_feature 1..4: note = RNA
  misc_feature 5..14: note = DNA
  misc_feature 15..18: note = RNA
cagaggtgaagcgaagtg

SEQ ID NO: 193 - DNA, 16 bp, synthetic construct
  source 1..16: mol_type = other DNA
  modified_base 1: mod_base = OTHER; note = 2'-O-methoxyethyl adenosine
  modified_base 2: mod_base = OTHER; note = 2'-O-methoxyethyl guanosine
  modified_base 3: mod_base = OTHER; note = 2'-O-methoxyethyl adenosine
  modified_base 11: mod_base = OTHER; note = 2'-deoxy 5-methylcytidine
  modified_base 14: mod_base = OTHER; note = 2'-O-methoxyethyl adenosine
  modified_base 15: mod_base = OTHER; note = 2'-O-methoxyethyl guanosine
  modified_base 16: mod_base = OTHER; note = 2'-O-methoxyethyl thymidine
  misc_feature 1..3: note = RNA
  misc_feature 4..13: note = DNA
  misc_feature 14..16: note = RNA
agaggtgaagcgaagt

SEQ ID NO: 194 - DNA, 14 bp, synthetic construct
  source 1..14: mol_type = other DNA
  modified_base 1: mod_base = OTHER; note = 2'-O-methoxyethyl guanosine
  modified_base 2: mod_base = OTHER; note = 2'-O-methoxyethyl adenosine
  modified_base 10: mod_base = OTHER; note = 2'-deoxy 5-methylcytidine
  modified_base 13: mod_base = OTHER; note = 2'-O-methoxyethyl adenosine
  modified_base 14: mod_base = OTHER; note = 2'-O-methoxyethyl guanosine
  misc_feature 1..2: note = RNA
  misc_feature 3..12: note = DNA
  misc_feature 13..14: note = RNA
gaggtgaagcgaag

SEQ ID NO: 195 - DNA, 25 bp, synthetic construct
  source 1..25: mol_type = other DNA
  modified_base 1: mod_base = OTHER; note = 2'-O-methoxyethyl guanosine
  modified_base 2: mod_base = OTHER; note = 2'-O-methoxyethyl 5-methylcytidine
  modified_base 3: mod_base = OTHER; note = 2'-O-methoxyethyl adenosine
  modified_base 4: mod_base = OTHER; note = 2'-O-methoxyethyl guanosine
  modified_base 5: mod_base = OTHER; note = 2'-O-methoxyethyl adenosine
  modified_base 13: mod_base = OTHER; note = 2'-deoxy 5-methylcytidine
  modified_base 16: mod_base = OTHER; note = 2'-O-methoxyethyl adenosine
  modified_base 17: mod_base = OTHER; note = 2'-O-methoxyethyl guanosine
  modified_base 18: mod_base = OTHER; note = 2'-O-methoxyethyl thymidine
  modified_base 19: mod_base = OTHER; note = 2'-O-methoxyethyl guanosine
  modified_base 20: mod_base = OTHER; note = 2'-O-methoxyethyl 5-methylcytidine
  modified_base 21: mod_base = OTHER; note = 2'-O-methoxyethyl adenosine
  modified_base 22: mod_base = OTHER; note = 2'-O-methoxyethyl adenosine
  modified_base 23: mod_base = OTHER; note = 2'-O-methoxyethyl 5-methylcytidine
  modified_base 24: mod_base = OTHER; note = 2'-O-methoxyethyl adenosine
  modified_base 25: mod_base = OTHER; note = 2'-O-methoxyethyl 5-methylcytidine
  misc_feature 1..5: note = RNA
  misc_feature 6..15: note = DNA
  misc_feature 16..25: note = RNA
gcagaggtgaagcgaagtgcaacac

SEQ ID NO: 196 - DNA, 30 bp, synthetic construct
  source 1..30: mol_type = other DNA
  modified_base 1: mod_base = OTHER; note = 2'-O-methoxyethyl guanosine
  modified_base 2: mod_base = OTHER; note = 2'-O-methoxyethyl 5-methylcytidine
  modified_base 3: mod_base = OTHER; note = 2'-O-methoxyethyl adenosine
  modified_base 4: mod_base = OTHER; note = 2'-O-methoxyethyl guanosine
  modified_base 5: mod_base = OTHER; note = 2'-O-methoxyethyl adenosine
  modified_base 13: mod_base = OTHER; note = 2'-deoxy 5-methylcytidine
  modified_base 16: mod_base = OTHER; note = 2'-O-methoxyethyl adenosine
  modified_base 17: mod_base = OTHER; note = 2'-O-methoxyethyl guanosine
  modified_base 18: mod_base = OTHER; note = 2'-O-methoxyethyl thymidine
  modified_base 19: mod_base = OTHER; note = 2'-O-methoxyethyl guanosine
  modified_base 20: mod_base = OTHER; note = 2'-O-methoxyethyl 5-methylcytidine
  modified_base 21: mod_base = OTHER; note = 2'-O-methoxyethyl adenosine
  modified_base 22: mod_base = OTHER; note = 2'-O-methoxyethyl adenosine
  modified_base 23: mod_base = OTHER; note = 2'-O-methoxyethyl 5-methylcytidine
  modified_base 24: mod_base = OTHER; note = 2'-O-methoxyethyl adenosine
  modified_base 25: mod_base = OTHER; note = 2'-O-methoxyethyl 5-methylcytidine
  modified_base 26: mod_base = OTHER; note = 2'-O-methoxyethyl adenosine
  modified_base 27: mod_base = OTHER; note = 2'-O-methoxyethyl adenosine
  modified_base 28: mod_base = OTHER; note = 2'-O-methoxyethyl 5-methylcytidine
  modified_base 29: mod_base = OTHER; note = 2'-O-methoxyethyl adenosine
  modified_base 30: mod_base = OTHER; note = 2'-O-methoxyethyl 5-methylcytidine
  misc_feature 1..5: note = RNA
  misc_feature 6..15: note = DNA
  misc_feature 16..30: note = RNA
gcagaggtgaagcgaagtgcaacacaacac

SEQ ID NO: 197 - DNA, 35 bp, synthetic construct
  source 1..35: mol_type = other DNA
  modified_base 1: mod_base = OTHER; note = 2'-O-methoxyethyl guanosine
  modified_base 2: mod_base = OTHER; note = 2'-O-methoxyethyl 5-methylcytidine
  modified_base 3: mod_base = OTHER; note = 2'-O-methoxyethyl adenosine
  modified_base 4: mod_base = OTHER; note = 2'-O-methoxyethyl guanosine
  modified_base 5: mod_base = OTHER; note = 2'-O-methoxyethyl adenosine
  modified_base 13: mod_base = OTHER; note = 2'-deoxy 5-methylcytidine
  modified_base 16: mod_base = OTHER; note = 2'-O-methoxyethyl adenosine
  modified_base 17: mod_base = OTHER; note = 2'-O-methoxyethyl guanosine
  modified_base 18: mod_base = OTHER; note = 2'-O-methoxyethyl thymidine
  modified_base 19: mod_base = OTHER; note = 2'-O-methoxyethyl guanosine
  modified_base 20: mod_base = OTHER; note = 2'-O-methoxyethyl 5-methylcytidine
  modified_base 21: mod_base = OTHER; note = 2'-O-methoxyethyl adenosine
  modified_base 22: mod_base = OTHER; note = 2'-O-methoxyethyl adenosine
  modified_base 23: mod_base = OTHER; note = 2'-O-methoxyethyl 5-methylcytidine
  modified_base 24: mod_base = OTHER; note = 2'-O-methoxyethyl adenosine
  modified_base 25: mod_base = OTHER; note = 2'-O-methoxyethyl 5-methylcytidine
  modified_base 26: mod_base = OTHER; note = 2'-O-methoxyethyl adenosine
  modified_base 27: mod_base = OTHER; note = 2'-O-methoxyethyl adenosine
  modified_base 28: mod_base = OTHER; note = 2'-O-methoxyethyl 5-methylcytidine
  modified_base 29: mod_base = OTHER; note = 2'-O-methoxyethyl adenosine
  modified_base 30: mod_base = OTHER; note = 2'-O-methoxyethyl 5-methylcytidine
  modified_base 31: mod_base = OTHER; note = 2'-O-methoxyethyl adenosine
  modified_base 32: mod_base = OTHER; note = 2'-O-methoxyethyl adenosine
  modified_base 33: mod_base = OTHER; note = 2'-O-methoxyethyl 5-methylcytidine
  modified_base 34: mod_base = OTHER; note = 2'-O-methoxyethyl adenosine
  modified_base 35: mod_base = OTHER; note = 2'-O-methoxyethyl 5-methylcytidine
  misc_feature 1..5: note = RNA
  misc_feature 6..15: note = DNA
  misc_feature 16..35: note = RNA
gcagaggtgaagcgaagtgcaacacaacacaacac

SEQ ID NO: 198 - DNA, 40 bp, synthetic construct; identical to SEQ ID NO: 69
  source 1..40: mol_type = other DNA
  modified_base 1: mod_base = OTHER; note = 2'-O-methoxyethyl guanosine
  modified_base 2: mod_base = OTHER; note = 2'-O-methoxyethyl 5-methylcytidine
  modified_base 3: mod_base = OTHER; note = 2'-O-methoxyethyl adenosine
  modified_base 4: mod_base = OTHER; note = 2'-O-methoxyethyl guanosine
  modified_base 5: mod_base = OTHER; note = 2'-O-methoxyethyl adenosine
  modified_base 13: mod_base = OTHER; note = 2'-deoxy 5-methylcytidine
  modified_base 16: mod_base = OTHER; note = 2'-O-methoxyethyl adenosine
  modified_base 17: mod_base = OTHER; note = 2'-O-methoxyethyl guanosine
  modified_base 18: mod_base = OTHER; note = 2'-O-methoxyethyl thymidine
  modified_base 19: mod_base = OTHER; note = 2'-O-methoxyethyl guanosine
  modified_base 20: mod_base = OTHER; note = 2'-O-methoxyethyl 5-methylcytidine
  modified_base 21: mod_base = OTHER; note = 2'-O-methoxyethyl adenosine
  modified_base 22: mod_base = OTHER; note = 2'-O-methoxyethyl adenosine
  modified_base 23: mod_base = OTHER; note = 2'-O-methoxyethyl 5-methylcytidine
  modified_base 24: mod_base = OTHER; note = 2'-O-methoxyethyl adenosine
  modified_base 25: mod_base = OTHER; note = 2'-O-methoxyethyl 5-methylcytidine
  modified_base 26: mod_base = OTHER; note = 2'-O-methoxyethyl adenosine
  modified_base 27: mod_base = OTHER; note = 2'-O-methoxyethyl adenosine
  modified_base 28: mod_base = OTHER; note = 2'-O-methoxyethyl 5-methylcytidine
  modified_base 29: mod_base = OTHER; note = 2'-O-methoxyethyl adenosine
  modified_base 30: mod_base = OTHER; note = 2'-O-methoxyethyl 5-methylcytidine
  modified_base 31: mod_base = OTHER; note = 2'-O-methoxyethyl adenosine
  modified_base 32: mod_base = OTHER; note = 2'-O-methoxyethyl adenosine
  modified_base 33: mod_base = OTHER; note = 2'-O-methoxyethyl 5-methylcytidine
  modified_base 34: mod_base = OTHER; note = 2'-O-methoxyethyl adenosine
  modified_base 35: mod_base = OTHER; note = 2'-O-methoxyethyl 5-methylcytidine
  modified_base 36: mod_base = OTHER; note = 2'-O-methoxyethyl adenosine
  modified_base 37: mod_base = OTHER; note = 2'-O-methoxyethyl adenosine
  modified_base 38: mod_base = OTHER; note = 2'-O-methoxyethyl 5-methylcytidine
  modified_base 39: mod_base = OTHER; note = 2'-O-methoxyethyl adenosine
  modified_base 40: mod_base = OTHER; note = 2'-O-methoxyethyl 5-methylcytidine
  misc_feature 1..5: note = RNA
  misc_feature 6..15: note = DNA
  misc_feature 16..40: note = RNA

SEQ ID NO: 199 - DNA, 45 bp, synthetic construct
  source 1..45: mol_type = other DNA
  modified_base 1: mod_base = OTHER; note = 2'-O-methoxyethyl guanosine
  modified_base 2: mod_base = OTHER; note = 2'-O-methoxyethyl 5-methylcytidine
  modified_base 3: mod_base = OTHER; note = 2'-O-methoxyethyl adenosine
  modified_base 4: mod_base = OTHER; note = 2'-O-methoxyethyl guanosine
  modified_base 5: mod_base = OTHER; note = 2'-O-methoxyethyl adenosine
  modified_base 13: mod_base = OTHER; note = 2'-deoxy 5-methylcytidine
  modified_base 16: mod_base = OTHER; note = 2'-O-methoxyethyl adenosine
  modified_base 17: mod_base = OTHER; note = 2'-O-methoxyethyl guanosine
  modified_base 18: mod_base = OTHER; note = 2'-O-methoxyethyl thymidine
  modified_base 19: mod_base = OTHER; note = 2'-O-methoxyethyl guanosine
  modified_base 20: mod_base = OTHER; note = 2'-O-methoxyethyl 5-methylcytidine
  modified_base 21: mod_base = OTHER; note = 2'-O-methoxyethyl adenosine
  modified_base 22: mod_base = OTHER; note = 2'-O-methoxyethyl adenosine
  modified_base 23: mod_base = OTHER; note = 2'-O-methoxyethyl 5-methylcytidine
  modified_base 24: mod_base = OTHER; note = 2'-O-methoxyethyl adenosine
  modified_base 25: mod_base = OTHER; note = 2'-O-methoxyethyl 5-methylcytidine
  modified_base 26: mod_base = OTHER; note = 2'-O-methoxyethyl adenosine
  modified_base 27: mod_base = OTHER; note = 2'-O-methoxyethyl adenosine
  modified_base 28: mod_base = OTHER; note = 2'-O-methoxyethyl 5-methylcytidine
  modified_base 29: mod_base = OTHER; note = 2'-O-methoxyethyl adenosine
  modified_base 30: mod_base = OTHER; note = 2'-O-methoxyethyl 5-methylcytidine
  modified_base 31: mod_base = OTHER; note = 2'-O-methoxyethyl adenosine
  modified_base 32: mod_base = OTHER; note = 2'-O-methoxyethyl adenosine
  modified_base 33: mod_base = OTHER; note = 2'-O-methoxyethyl 5-methylcytidine
  modified_base 34: mod_base = OTHER; note = 2'-O-methoxyethyl adenosine
  modified_base 35: mod_base = OTHER; note = 2'-O-methoxyethyl 5-methylcytidine
  modified_base 36: mod_base = OTHER; note = 2'-O-methoxyethyl adenosine
  modified_base 37: mod_base = OTHER; note = 2'-O-methoxyethyl adenosine
  modified_base 38: mod_base = OTHER; note = 2'-O-methoxyethyl 5-methylcytidine
  modified_base 39: mod_base = OTHER; note = 2'-O-methoxyethyl adenosine
  modified_base 40: mod_base = OTHER; note = 2'-O-methoxyethyl 5-methylcytidine
  modified_base 41: mod_base = OTHER; note = 2'-O-methoxyethyl adenosine
  modified_base 42: mod_base = OTHER; note = 2'-O-methoxyethyl adenosine
  modified_base 43: mod_base = OTHER; note = 2'-O-methoxyethyl 5-methylcytidine
  modified_base 44: mod_base = OTHER; note = 2'-O-methoxyethyl adenosine
  modified_base 45: mod_base = OTHER; note = 2'-O-methoxyethyl 5-methylcytidine
  misc_feature 1..5: note = RNA
  misc_feature 6..15: note = DNA
  misc_feature 16..45: note = RNA
gcagaggtgaagcgaagtgcaacacaacacaacacaacacaacac

SEQ ID NO: 200 - DNA, 50 bp, synthetic construct
  source 1..50: mol_type = other DNA
  modified_base 1: mod_base = OTHER; note = 2'-O-methoxyethyl guanosine
  modified_base 2: mod_base = OTHER; note = 2'-O-methoxyethyl 5-methylcytidine
  modified_base 3: mod_base = OTHER; note = 2'-O-methoxyethyl adenosine
  modified_base 4: mod_base = OTHER; note = 2'-O-methoxyethyl guanosine
  modified_base 5: mod_base = OTHER; note = 2'-O-methoxyethyl adenosine
  modified_base 13: mod_base = OTHER; note = 2'-deoxy 5-methylcytidine
  modified_base 16: mod_base = OTHER; note = 2'-O-methoxyethyl adenosine
  modified_base 17: mod_base = OTHER; note = 2'-O-methoxyethyl guanosine
  modified_base 18: mod_base = OTHER; note = 2'-O-methoxyethyl thymidine
  modified_base 19: mod_base = OTHER; note = 2'-O-methoxyethyl guanosine
  modified_base 20: mod_base = OTHER; note = 2'-O-methoxyethyl 5-methylcytidine
  modified_base 21: mod_base = OTHER; note = 2'-O-methoxyethyl adenosine
  modified_base 22: mod_base = OTHER; note = 2'-O-methoxyethyl adenosine
  modified_base 23: mod_base = OTHER; note = 2'-O-methoxyethyl 5-methylcytidine
  modified_base 24: mod_base = OTHER; note = 2'-O-methoxyethyl adenosine
  modified_base 25: mod_base = OTHER; note = 2'-O-methoxyethyl 5-methylcytidine
  modified_base 26: mod_base = OTHER; note = 2'-O-methoxyethyl adenosine
  modified_base 27: mod_base = OTHER; note = 2'-O-methoxyethyl adenosine
  modified_base 28: mod_base = OTHER; note = 2'-O-methoxyethyl 5-methylcytidine
  modified_base 29: mod_base = OTHER; note = 2'-O-methoxyethyl adenosine
  modified_base 30: mod_base = OTHER; note = 2'-O-methoxyethyl 5-methylcytidine
  modified_base 31: mod_base = OTHER; note = 2'-O-methoxyethyl adenosine
  modified_base 32: mod_base = OTHER; note = 2'-O-methoxyethyl adenosine
  modified_base 33: mod_base = OTHER; note = 2'-O-methoxyethyl 5-methylcytidine
  modified_base 34: mod_base = OTHER; note = 2'-O-methoxyethyl adenosine
  modified_base 35: mod_base = OTHER; note = 2'-O-methoxyethyl 5-methylcytidine
  modified_base 36: mod_base = OTHER; note = 2'-O-methoxyethyl adenosine
  modified_base 37: mod_base = OTHER; note = 2'-O-methoxyethyl adenosine
  modified_base 38: mod_base = OTHER; note = 2'-O-methoxyethyl 5-methylcytidine
  modified_base 39: mod_base = OTHER; note = 2'-O-methoxyethyl adenosine
  modified_base 40: mod_base = OTHER; note = 2'-O-methoxyethyl 5-methylcytidine
  modified_base 41: mod_base = OTHER; note = 2'-O-methoxyethyl adenosine
  modified_base 42: mod_base = OTHER; note = 2'-O-methoxyethyl adenosine
  modified_base 43: mod_base = OTHER; note = 2'-O-methoxyethyl 5-methylcytidine
  modified_base 44: mod_base = OTHER; note = 2'-O-methoxyethyl adenosine
  modified_base 45: mod_base = OTHER; note = 2'-O-methoxyethyl 5-methylcytidine
  modified_base 46: mod_base = OTHER; note = 2'-O-methoxyethyl adenosine
  modified_base 47: mod_base = OTHER; note = 2'-O-methoxyethyl adenosine
  modified_base 48: mod_base = OTHER; note = 2'-O-methoxyethyl 5-methylcytidine
  modified_base 49: mod_base = OTHER; note = 2'-O-methoxyethyl adenosine
  modified_base 50: mod_base = OTHER; note = 2'-O-methoxyethyl 5-methylcytidine
  misc_feature 1..5: note = RNA
  misc_feature 6..15: note = DNA
  misc_feature 16..50: note = RNA
gcagaggtgaagcgaagtgcaacacaacacaacacaacacaacacaacac

SEQ ID NO: 201 - DNA, 40 bp, synthetic construct; identical to SEQ ID NO: 12
  source 1..40: mol_type = other DNA
  modified_base 1: mod_base = OTHER; note = 2'-O-methoxyethyl guanosine
  modified_base 2: mod_base = OTHER; note = 2'-O-methoxyethyl 5-methylcytidine
  modified_base 3: mod_base = OTHER; note = 2'-O-methoxyethyl adenosine
  modified_base 4: mod_base = OTHER; note = 2'-O-methoxyethyl guanosine
  modified_base 5: mod_base = OTHER; note = 2'-O-methoxyethyl adenosine
  modified_base 13: mod_base = OTHER; note = 2'-deoxy 5-methylcytidine
  modified_base 16: mod_base = OTHER; note = 2'-O-methoxyethyl adenosine
  modified_base 17: mod_base = OTHER; note = 2'-O-methoxyethyl guanosine
  modified_base 18: mod_base = OTHER; note = 2'-O-methoxyethyl thymidine
  modified_base 19: mod_base = OTHER; note = 2'-O-methoxyethyl guanosine
  modified_base 20: mod_base = OTHER; note = 2'-O-methoxyethyl 5-methylcytidine
  modified_base 21: mod_base = OTHER; note = 2'-O-methoxyethyl adenosine
  modified_base 22: mod_base = OTHER; note = 2'-O-methoxyethyl adenosine
  modified_base 23: mod_base = OTHER; note = 2'-O-methoxyethyl adenosine
  modified_base 24: mod_base = OTHER; note = 2'-O-methoxyethyl 5-methylcytidine
  modified_base 25: mod_base = OTHER; note = 2'-O-methoxyethyl adenosine
  modified_base 26: mod_base = OTHER; note = 2'-O-methoxyethyl adenosine
  modified_base 27: mod_base = OTHER; note = 2'-O-methoxyethyl 5-methylcytidine
  modified_base 28: mod_base = OTHER; note = 2'-O-methoxyethyl adenosine
  modified_base 29: mod_base = OTHER; note = 2'-O-methoxyethyl adenosine
  modified_base 30: mod_base = OTHER; note = 2'-O-methoxyethyl adenosine
  modified_base 31: mod_base = OTHER; note = 2'-O-methoxyethyl 5-methylcytidine
  modified_base 32: mod_base = OTHER; note = 2'-O-methoxyethyl adenosine
  modified_base 33: mod_base = OTHER; note = 2'-O-methoxyethyl adenosine
  modified_base 34: mod_base = OTHER; note = 2'-O-methoxyethyl 5-methylcytidine
  modified_base 35: mod_base = OTHER; note = 2'-O-methoxyethyl adenosine
  modified_base 36: mod_base = OTHER; note = 2'-O-methoxyethyl adenosine
  modified_base 37: mod_base = OTHER; note = 2'-O-methoxyethyl adenosine
  modified_base 38: mod_base = OTHER; note = 2'-O-methoxyethyl 5-methylcytidine
  modified_base 39: mod_base = OTHER; note = 2'-O-methoxyethyl adenosine
  modified_base 40: mod_base = OTHER; note = 2'-O-methoxyethyl adenosine
  misc_feature 1..5: note = RNA
  misc_feature 6..15: note = DNA
  misc_feature 16..40: note = RNA

SEQ ID NO: 202 - DNA, 40 bp, synthetic construct
  source 1..40: mol_type = other DNA
  modified_base 1: mod_base = OTHER; note = 2'-O-methoxyethyl guanosine
  modified_base 2: mod_base = OTHER; note = 2'-O-methoxyethyl 5-methylcytidine
  modified_base 3: mod_base = OTHER; note = 2'-O-methoxyethyl adenosine
  modified_base 4: mod_base = OTHER; note = 2'-O-methoxyethyl guanosine
  modified_base 5: mod_base = OTHER; note = 2'-O-methoxyethyl adenosine
  modified_base 13: mod_base = OTHER; note = 2'-deoxy 5-methylcytidine
  modified_base 16: mod_base = OTHER; note = 2'-O-methoxyethyl adenosine
  modified_base 17: mod_base = OTHER; note = 2'-O-methoxyethyl guanosine
  modified_base 18: mod_base = OTHER; note = 2'-O-methoxyethyl thymidine
  modified_base 19: mod_base = OTHER; note = 2'-O-methoxyethyl guanosine
  modified_base 20: mod_base = OTHER; note = 2'-O-methoxyethyl 5-methylcytidine
  modified_base 21: mod_base = OTHER; note = 2'-O-methoxyethyl adenosine
  modified_base 22: mod_base = OTHER; note = 2'-O-methoxyethyl 5-methylcytidine
  modified_base 23: mod_base = OTHER; note = 2'-O-methoxyethyl adenosine
  modified_base 24: mod_base = OTHER; note = 2'-O-methoxyethyl 5-methylcytidine
  modified_base 25: mod_base = OTHER; note = 2'-O-methoxyethyl adenosine
  modified_base 26: mod_base = OTHER; note = 2'-O-methoxyethyl 5-methylcytidine
  modified_base 27: mod_base = OTHER; note = 2'-O-methoxyethyl adenosine
  modified_base 28: mod_base = OTHER; note = 2'-O-methoxyethyl 5-methylcytidine
  modified_base 29: mod_base = OTHER; note = 2'-O-methoxyethyl adenosine
  modified_base 30: mod_base = OTHER; note = 2'-O-methoxyethyl 5-methylcytidine
  modified_base 31: mod_base = OTHER; note = 2'-O-methoxyethyl adenosine
  modified_base 32: mod_base = OTHER; note = 2'-O-methoxyethyl 5-methylcytidine
  modified_base 33: mod_base = OTHER; note = 2'-O-methoxyethyl adenosine
  modified_base 34: mod_base = OTHER; note = 2'-O-methoxyethyl 5-methylcytidine
  modified_base 35: mod_base = OTHER; note = 2'-O-methoxyethyl adenosine
  modified_base 36: mod_base = OTHER; note = 2'-O-methoxyethyl 5-methylcytidine
  modified_base 37: mod_base = OTHER; note = 2'-O-methoxyethyl adenosine
  modified_base 38: mod_base = OTHER; note = 2'-O-methoxyethyl 5-methylcytidine
  modified_base 39: mod_base = OTHER; note = 2'-O-methoxyethyl adenosine
  modified_base 40: mod_base = OTHER; note = 2'-O-methoxyethyl 5-methylcytidine
  misc_feature 1..5: note = RNA
  misc_feature 6..15: note = DNA
  misc_feature 16..40: note = RNA
gcagaggtgaagcgaagtgcacacacacacacacacacac

SEQ ID NO: 203 - DNA, 40 bp, synthetic construct; identical to SEQ ID NO: 69
  source 1..40: mol_type = other DNA
  modified_base 1: mod_base = OTHER; note = 2'-O-methoxyethyl guanosine
  modified_base 2: mod_base = OTHER; note = 2'-O-methoxyethyl 5-methylcytidine
  modified_base 3: mod_base = OTHER; note = 2'-O-methoxyethyl adenosine
  modified_base 4: mod_base = OTHER; note = 2'-O-methoxyethyl guanosine
  modified_base 5: mod_base = OTHER; note = 2'-O-methoxyethyl adenosine
  modified_base 13: mod_base = OTHER; note = 2'-deoxy 5-methylcytidine
  modified_base 16: mod_base = OTHER; note = 2'-O-methoxyethyl adenosine
  modified_base 17: mod_base = OTHER; note = 2'-O-methoxyethyl guanosine
  modified_base 18: mod_base = OTHER; note = 2'-O-methoxyethyl thymidine
  modified_base 19: mod_base = OTHER; note = 2'-O-methoxyethyl guanosine
  modified_base 20: mod_base = OTHER; note = 2'-O-methoxyethyl 5-methylcytidine
  modified_base 21: mod_base = OTHER; note = 2'-O-methoxyethyl adenosine
  modified_base 22: mod_base = OTHER; note = 2'-O-methoxyethyl adenosine
  modified_base 23: mod_base = OTHER; note = 2'-O-methoxyethyl 5-methylcytidine
  modified_base 24: mod_base = OTHER; note = 2'-O-methoxyethyl adenosine
  modified_base 25: mod_base = OTHER; note = 2'-O-methoxyethyl 5-methylcytidine
  modified_base 26: mod_base = OTHER; note = 2'-O-methoxyethyl adenosine
  modified_base 27: mod_base = OTHER; note = 2'-O-methoxyethyl adenosine
  modified_base 28: mod_base = OTHER; note = 2'-O-methoxyethyl 5-methylcytidine
  modified_base 29: mod_base = OTHER; note = 2'-O-methoxyethyl adenosine
  modified_base 30: mod_base = OTHER; note = 2'-O-methoxyethyl 5-methylcytidine
  modified_base 31: mod_base = OTHER; note = 2'-O-methoxyethyl adenosine
  modified_base 32: mod_base = OTHER; note = 2'-O-methoxyethyl adenosine
  modified_base 33: mod_base = OTHER; note = 2'-O-methoxyethyl 5-methylcytidine
  modified_base 34: mod_base = OTHER; note = 2'-O-methoxyethyl adenosine
  modified_base 35: mod_base = OTHER; note = 2'-O-methoxyethyl 5-methylcytidine
  modified_base 36: mod_base = OTHER; note = 2'-O-methoxyethyl adenosine
  modified_base 37: mod_base = OTHER; note = 2'-O-methoxyethyl adenosine
  modified_base 38: mod_base = OTHER; note = 2'-O-methoxyethyl 5-methylcytidine
  modified_base 39: mod_base = OTHER; note = 2'-O-methoxyethyl adenosine
  modified_base 40: mod_base = OTHER; note = 2'-O-methoxyethyl 5-methylcytidine
  misc_feature 1..5: note = RNA
  misc_feature 6..15: note = DNA
  misc_feature 16..40: note = RNA

SEQ ID NO: 204 - DNA, 40 bp, synthetic construct; identical to SEQ ID NO: 202
  source 1..40: mol_type = other DNA
  modified_base 1: mod_base = OTHER; note = 2'-O-methoxyethyl guanosine
  modified_base 2: mod_base = OTHER; note = 2'-O-methoxyethyl 5-methylcytidine
  modified_base 3: mod_base = OTHER; note = 2'-O-methoxyethyl adenosine
  modified_base 4: mod_base = OTHER; note = 2'-O-methoxyethyl guanosine
  modified_base 5: mod_base = OTHER; note = 2'-O-methoxyethyl adenosine
  modified_base 13: mod_base = OTHER; note = 2'-deoxy 5-methylcytidine
  modified_base 16: mod_base = OTHER; note = 2'-O-methoxyethyl adenosine
  modified_base 17: mod_base = OTHER; note = 2'-O-methoxyethyl guanosine
  modified_base 18: mod_base = OTHER; note = 2'-O-methoxyethyl thymidine
  modified_base 19: mod_base = OTHER; note = 2'-O-methoxyethyl guanosine
  modified_base 20: mod_base = OTHER; note = 2'-O-methoxyethyl 5-methylcytidine
  modified_base 21: mod_base = OTHER; note = 2'-O-methoxyethyl adenosine
  modified_base 22: mod_base = OTHER; note = 2'-O-methoxyethyl 5-methylcytidine
  modified_base 23: mod_base = OTHER; note = 2'-O-methoxyethyl adenosine
  modified_base 24: mod_base = OTHER; note = 2'-O-methoxyethyl 5-methylcytidine
  modified_base 25: mod_base = OTHER; note = 2'-O-methoxyethyl adenosine
  modified_base 26: mod_base = OTHER; note = 2'-O-methoxyethyl 5-methylcytidine
  modified_base 27: mod_base = OTHER; note = 2'-O-methoxyethyl adenosine
  modified_base 28: mod_base = OTHER; note = 2'-O-methoxyethyl 5-methylcytidine
  modified_base 29: mod_base = OTHER; note = 2'-O-methoxyethyl adenosine
  modified_base 30: mod_base = OTHER; note = 2'-O-methoxyethyl 5-methylcytidine
  modified_base 31: mod_base = OTHER; note = 2'-O-methoxyethyl adenosine
  modified_base 32: mod_base = OTHER; note = 2'-O-methoxyethyl 5-methylcytidine
  modified_base 33: mod_base = OTHER; note = 2'-O-methoxyethyl adenosine
  modified_base 34: mod_base = OTHER; note = 2'-O-methoxyethyl 5-methylcytidine
  modified_base 35: mod_base = OTHER; note = 2'-O-methoxyethyl adenosine
  modified_base 36: mod_base = OTHER; note = 2'-O-methoxyethyl 5-methylcytidine
  modified_base 37: mod_base = OTHER; note = 2'-O-methoxyethyl adenosine
  modified_base 38: mod_base = OTHER; note = 2'-O-methoxyethyl 5-methylcytidine
  modified_base 39: mod_base = OTHER; note = 2'-O-methoxyethyl adenosine
  modified_base 40: mod_base = OTHER; note = 2'-O-methoxyethyl 5-methylcytidine
  misc_feature 1..5: note = RNA
  misc_feature 6..15: note = DNA
  misc_feature 16..40: note = RNA

SEQ ID NO: 205 - DNA, 19 bp, synthetic construct
  source 1..19: mol_type = other DNA
  modified_base 1: mod_base = OTHER; note = 2'-O-methoxyethyl guanosine
  modified_base 2: mod_base = OTHER; note = 2'-O-methoxyethyl 5-methylcytidine
  modified_base 3: mod_base = OTHER; note = 2'-O-methoxyethyl adenosine
  modified_base 4: mod_base = OTHER; note = 2'-O-methoxyethyl guanosine
  modified_base 5: mod_base = OTHER; note = 2'-O-methoxyethyl adenosine
  modified_base 10: mod_base = OTHER; note = 2'-O-methoxyethyl adenosine
  modified_base 13: mod_base = OTHER; note = 2'-deoxy 5-methylcytidine
  modified_base 16: mod_base = OTHER; note = 2'-O-methoxyethyl adenosine
  modified_base 17: mod_base = OTHER; note = 2'-O-methoxyethyl guanosine
  modified_base 18: mod_base = OTHER; note = 2'-O-methoxyethyl uridine
  modified_base 19: mod_base = OTHER; note = 2'-O-methoxyethyl guanosine
  misc_feature 1..5: note = RNA
  misc_feature 6..9: note = DNA
  misc_feature 10: note = RNA
  misc_feature 11..15: note = DNA
  misc_feature 16..19: note = RNA
gcagaggtgaagcgaagtg

SEQ ID NO: 206 - DNA, 18 bp, synthetic construct
  source 1..18: mol_type = other DNA
  modified_base 1: mod_base = OTHER; note = 2'-O-methoxyethyl 5-methylcytidine
  modified_base 2: mod_base = OTHER; note = 2'-O-methoxyethyl adenosine
  modified_base 3: mod_base = OTHER; note = 2'-O-methoxyethyl guanosine
  modified_base 4: mod_base = OTHER; note = 2'-O-methoxyethyl adenosine
  modified_base 9: mod_base = OTHER; note = 2'-O-methoxyethyl adenosine
  modified_base 12: mod_base = OTHER; note = 2'-deoxy 5-methylcytidine
  modified_base 15: mod_base = OTHER; note = 2'-O-methoxyethyl adenosine
  modified_base 16: mod_base = OTHER; note = 2'-O-methoxyethyl guanosine
  modified_base 17: mod_base = OTHER; note = 2'-O-methoxyethyl uridine
  modified_base 18: mod_base = OTHER; note = 2'-O-methoxyethyl guanosine
  misc_feature 1..4: note = RNA
  misc_feature 5..8: note = DNA
  misc_feature 9: note = RNA
  misc_feature 10..14: note = DNA
  misc_feature 15..18: note = RNA
cagaggtgaagcgaagtg

SEQ ID NO: 207 - DNA, 17 bp, synthetic construct
  source 1..17: mol_type = other DNA
  modified_base 1: mod_base = OTHER; note = 2'-O-methoxyethyl adenosine
  modified_base 2: mod_base = OTHER; note = 2'-O-methoxyethyl guanosine
  modified_base 3: mod_base = OTHER; note = 2'-O-methoxyethyl adenosine
  modified_base 8: mod_base = OTHER; note = 2'-O-methoxyethyl adenosine
  modified_base 11: mod_base = OTHER; note = 2'-deoxy 5-methylcytidine
  modified_base 14: mod_base = OTHER; note = 2'-O-methoxyethyl adenosine
  modified_base 15: mod_base = OTHER; note = 2'-O-methoxyethyl guanosine
  modified_base 16: mod_base = OTHER; note = 2'-O-methoxyethyl uridine
  modified_base 17: mod_base = OTHER; note = 2'-O-methoxyethyl guanosine
  misc_feature 1..3: note = RNA
  misc_feature 4..7: note = DNA
  misc_feature 8: note = RNA
  misc_feature 9..13: note = DNA
  misc_feature 14..17: note = RNA
agaggtgaagcgaagtg

SEQ ID NO: 208 - DNA, 17 bp, synthetic construct
  source 1..17: mol_type = other DNA
  modified_base 1: mod_base = OTHER; note = 2'-O-methoxyethyl 5-methylcytidine
  modified_base 2: mod_base = OTHER; note = 2'-O-methoxyethyl adenosine
  modified_base 3: mod_base = OTHER; note = 2'-O-methoxyethyl guanosine
  modified_base 4: mod_base = OTHER; note = 2'-O-methoxyethyl adenosine
  modified_base 9: mod_base = OTHER; note = 2'-O-methoxyethyl adenosine
  modified_base 12: mod_base = OTHER; note = 2'-deoxy 5-methylcytidine
  modified_base 15: mod_base = OTHER; note = 2'-O-methoxyethyl adenosine
  modified_base 16: mod_base = OTHER; note = 2'-O-methoxyethyl guanosine
  modified_base 17: mod_base = OTHER; note = 2'-O-methoxyethyl uridine
  misc_feature 1..4: note = RNA
  misc_feature 5..8: note = DNA
  misc_feature 9: note = RNA
  misc_feature 10..14: note = DNA
  misc_feature 15..17: note = RNA
cagaggtgaagcgaagt

SEQ ID NO: 209 - DNA, 16 bp, synthetic construct
  source 1..16: mol_type = other DNA
  modified_base 1: mod_base = OTHER; note = 2'-O-methoxyethyl adenosine
  modified_base 2: mod_base = OTHER; note = 2'-O-methoxyethyl guanosine
  modified_base 3: mod_base = OTHER; note = 2'-O-methoxyethyl adenosine
  modified_base 8: mod_base = OTHER; note = 2'-O-methoxyethyl adenosine
  modified_base 11: mod_base = OTHER; note = 2'-deoxy 5-methylcytidine
  modified_base 14: mod_base = OTHER; note = 2'-O-methoxyethyl adenosine
  modified_base 15: mod_base = OTHER; note = 2'-O-methoxyethyl guanosine
  modified_base 16: mod_base = OTHER; note = 2'-O-methoxyethyl uridine
  misc_feature 1..3: note = RNA
  misc_feature 4..7: note = DNA
  misc_feature 8: note = RNA
  misc_feature 9..13: note = DNA
  misc_feature 14..16: note = RNA
agaggtgaagcgaagt

SEQ ID NO: 210 - DNA, 20 bp, synthetic construct
  source 1..20: mol_type = other DNA
  modified_base 2: mod_base = OTHER; note = 2'-deoxy cytidine
  modified_base 13: mod_base = OTHER; note = 2'-deoxy cytidine
  modified_base 20: mod_base = OTHER; note = 2'-deoxy cytidine
gcagaggtgaagcgaagtgc

SEQ ID NO: 211 - DNA, 20 bp, synthetic construct
  source 1..20: mol_type = other DNA
  modified_base 1: mod_base = OTHER; note = 2'-O-methyl guanosine
  modified_base 2: mod_base = OTHER; note = 2'-O-methyl 5-methylcytidine
  modified_base 3: mod_base = OTHER; note = 2'-O-methyl adenosine
  modified_base 4: mod_base = OTHER; note = 2'-O-methyl guanosine
  modified_base 5: mod_base = OTHER; note = 2'-O-methyl adenosine
  modified_base 13: mod_base = OTHER; note = 2'-deoxy cytidine
  modified_base 16: mod_base = OTHER; note = 2'-O-methyl adenosine
  modified_base 17: mod_base = OTHER; note = 2'-O-methyl guanosine
  modified_base 18: mod_base = OTHER; note = 2'-O-methyl thymidine
  modified_base 19: mod_base = OTHER; note = 2'-O-methyl guanosine
  modified_base 20: mod_base = OTHER; note = 2'-O-methyl 5-methylcytidine
  misc_feature 1..5: note = RNA
  misc_feature 6..15: note = DNA
  misc_feature 16..20: note = RNA
gcagaggtgaagcgaagtgc

SEQ ID NO: 212 - DNA, 20 bp, synthetic construct
  source 1..20: mol_type = other DNA
  modified_base 1: mod_base = OTHER; note = 2'-O-methoxyethyl guanosine
  modified_base 2: mod_base = OTHER; note = 2'-O-methoxyethyl 5-methylcytidine
  modified_base 3: mod_base = OTHER; note = 2'-O-methoxyethyl adenosine
  modified_base 4: mod_base = OTHER; note = 2'-O-methoxyethyl guanosine
  modified_base 5: mod_base = OTHER; note = 2'-O-methoxyethyl adenosine
  modified_base 13: mod_base = OTHER; note = 2'-deoxy 5-methylcytidine
  modified_base 16: mod_base = OTHER; note = 2'-O-methoxyethyl adenosine
  modified_base 17: mod_base = OTHER; note = 2'-O-methoxyethyl guanosine
  modified_base 18: mod_base = OTHER; note = 2'-O-methoxyethyl uridine
  modified_base 19: mod_base = OTHER; note = 2'-O-methoxyethyl guanosine
  modified_base 20: mod_base = OTHER; note = 2'-O-methoxyethyl 5-methylcytidine
  misc_feature 1..5: note = RNA
  misc_feature 6..15: note = DNA
  misc_feature 16..20: note = RNA
gcagaggtgaagcgaagtgc

SEQ ID NO: 213 - DNA, 20 bp, synthetic construct
  source 1..20: mol_type = other DNA
  modified_base 1: mod_base = OTHER; note = 2'-O-methoxyethyl adenosine
  modified_base 2: mod_base = OTHER; note = 2'-O-methoxyethyl adenosine
  modified_base 3: mod_base = OTHER; note = 2'-O-methoxyethyl 5-methylcytidine
  modified_base 4: mod_base = OTHER; note = 2'-O-methoxyethyl adenosine
  modified_base 5: mod_base = OTHER; note = 2'-O-methoxyethyl adenosine
  modified_base 13: mod_base = OTHER; note = 2'-deoxy 5-methylcytidine
  modified_base 16: mod_base = OTHER; note = 2'-O-methoxyethyl adenosine
  modified_base 17: mod_base = OTHER; note = 2'-O-methoxyethyl guanosine
  modified_base 18: mod_base = OTHER; note = 2'-O-methoxyethyl thymidine
  modified_base 19: mod_base = OTHER; note = 2'-O-methoxyethyl guanosine
  modified_base 20: mod_base = OTHER; note = 2'-O-methoxyethyl 5-methylcytidine
  misc_feature 1..5: note = RNA
  misc_feature 6..15: note = DNA
  misc_feature 16..20: note = RNA
aacaaggtgaagcgaagtgc

SEQ ID NO: 214 - DNA, 20 bp, synthetic construct
  source 1..20: mol_type = other DNA
  modified_base 1: mod_base = OTHER; note = 2'-O-methoxyethyl guanosine
  modified_base 2: mod_base = OTHER; note = 2'-O-methoxyethyl 5-methylcytidine
  modified_base 3: mod_base = OTHER; note = 2'-O-methoxyethyl adenosine
  modified_base 4: mod_base = OTHER; note = 2'-O-methoxyethyl guanosine
  modified_base 5: mod_base = OTHER; note = 2'-O-methoxyethyl adenosine
  modified_base 13: mod_base = OTHER; note = 2'-deoxy 5-methylcytidine
  modified_base 16: mod_base = OTHER; note = 2'-O-methoxyethyl adenosine
  modified_base 17: mod_base = OTHER; note = 2'-O-methoxyethyl adenosine
  modified_base 18: mod_base = OTHER; note = 2'-O-methoxyethyl 5-methylcytidine
  modified_base 19: mod_base = OTHER; note = 2'-O-methoxyethyl adenosine
  modified_base 20: mod_base = OTHER; note = 2'-O-methoxyethyl adenosine
  misc_feature 1..5: note = RNA
  misc_feature 6..15: note = DNA
  misc_feature 16..20: note = RNA
gcagaggtgaagcgaaacaa

SEQ ID NO: 215 - DNA, 20 bp, synthetic construct
  source 1..20: mol_type = other DNA
  modified_base 1: mod_base = OTHER; note = 2'-O-methyl guanosine
  modified_base 2: mod_base = OTHER; note = 2'-O-methyl 5-methylcytidine
  modified_base 3: mod_base = OTHER; note = 2'-O-methyl adenosine
  modified_base 4: mod_base = OTHER; note = 2'-O-methyl guanosine
  modified_base 5: mod_base = OTHER; note = 2'-O-methyl adenosine
  modified_base 13: mod_base = OTHER; note = 2'-deoxy 5-methylcytidine
  modified_base 16: mod_base = OTHER; note = 2'-O-methyl adenosine
  modified_base 17: mod_base = OTHER; note = 2'-O-methyl guanosine
  modified_base 18: mod_base = OTHER; note = 2'-O-methyl uridine
  modified_base 19: mod_base = OTHER; note = 2'-O-methyl guanosine
  modified_base 20: mod_base = OTHER; note = 2'-O-methyl 5-methylcytidine
  misc_feature 1..5: note = RNA
  misc_feature 6..15: note = DNA
  misc_feature 16..20: note = RNA
gcagaggtgaagcgaagtgc

SEQ ID NO: 216 - DNA, 20 bp, synthetic construct
  source 1..20: mol_type = other DNA
  modified_base 2: mod_base = OTHER; note = 2'-deoxy 5-methylcytidine
  modified_base 13: mod_base = OTHER; note = 2'-deoxy 5-methylcytidine
  modified_base 20: mod_base = OTHER; note = 2'-deoxy 5-methylcytidine
gcagaggtgaagcgaagtgc

SEQ ID NO: 217 - DNA, 30 bp, synthetic construct; identical to SEQ ID NO: 186
  source 1..30: mol_type = other DNA
  modified_base 2: mod_base = OTHER; note = 2'-deoxy 5-methylcytidine
  modified_base 13: mod_base = OTHER; note = 2'-deoxy 5-methylcytidine
  modified_base 20: mod_base = OTHER; note = 2'-deoxy 5-methylcytidine
  modified_base 24: mod_base = OTHER; note = 2'-deoxy 5-methylcytidine
  modified_base 27: mod_base = OTHER; note = 2'-deoxy 5-methylcytidine

SEQ ID NO: 218 - DNA, 20 bp, synthetic construct
  source 1..20: mol_type = other DNA
  modified_base 1: mod_base = OTHER; note = Locked nucleic acid with guanine base
  modified_base 2: mod_base = OTHER; note = Locked nucleic acid with cytosine base
  modified_base 3: mod_base = OTHER; note = Locked nucleic acid with adenine base
  modified_base 4: mod_base = OTHER; note = Locked nucleic acid with guanine base
  modified_base 5: mod_base = OTHER; note = Locked nucleic acid with adenine base
  modified_base 13: mod_base = OTHER; note = 2'-deoxy 5-methylcytidine
  modified_base 16: mod_base = OTHER; note = 2'-O-methoxyethyl adenosine
  modified_base 17: mod_base = OTHER; note = 2'-O-methoxyethyl guanosine
  modified_base 18: mod_base = OTHER; note = 2'-O-methoxyethyl thymidine
  modified_base 19: mod_base = OTHER; note = 2'-O-methoxyethyl guanosine
  modified_base 20: mod_base = OTHER; note = 2'-O-methoxyethyl 5-methylcytidine
  misc_feature 1..5: note = RNA
  misc_feature 6..15: note = DNA
  misc_feature 16..20: note = RNA
gcagaggtgaagcgaagtgc

SEQ ID NO: 219 - DNA, 20 bp, synthetic construct
  source 1..20: mol_type = other DNA
  modified_base 1: mod_base = OTHER; note = Locked nucleic acid with guanine base
  modified_base 2: mod_base = OTHER; note = 2'-O-methoxyethyl 5-methylcytidine
  modified_base 3: mod_base = OTHER; note = 2'-O-methoxyethyl adenosine
  modified_base 4: mod_base = OTHER; note = 2'-O-methoxyethyl guanosine
  modified_base 5: mod_base = OTHER; note = 2'-O-methoxyethyl adenosine
  modified_base 10: mod_base = OTHER; note = 2'-O-methoxyethyl adenosine
  modified_base 13: mod_base = OTHER; note = 2'-deoxy 5-methylcytidine
  modified_base 16: mod_base = OTHER; note = 2'-O-methoxyethyl adenosine
  modified_base 17: mod_base = OTHER; note = 2'-O-methoxyethyl guanosine
  modified_base 18: mod_base = OTHER; note = 2'-O-methoxyethyl thymidine
  modified_base 19: mod_base = OTHER; note = 2'-O-methoxyethyl guanosine
  modified_base 20: mod_base = OTHER; note = 2'-O-methoxyethyl 5-methylcytidine
  misc_feature 1..5: note = RNA
  misc_feature 6..9: note = DNA
  misc_feature 10: note = RNA
  misc_feature 11..15: note = DNA
  misc_feature 16..20: note = RNA
gcagaggtgaagcgaagtgc

SEQ ID NO: 220 - DNA, 20 bp, synthetic construct
  source 1..20: mol_type = other DNA
  modified_base 1: mod_base = OTHER; note = Locked nucleic acid with guanine base
  modified_base 2: mod_base = OTHER; note = Locked nucleic acid with cytosine base
  modified_base 3: mod_base = OTHER; note = 2'-O-methoxyethyl adenosine
  modified_base 4: mod_base = OTHER; note = 2'-O-methoxyethyl guanosine
  modified_base 5: mod_base = OTHER; note = 2'-O-methoxyethyl adenosine
  modified_base 10: mod_base = OTHER; note = 2'-O-methoxyethyl adenosine
  modified_base 13: mod_base = OTHER; note = 2'-deoxy 5-methylcytidine
  modified_base 16: mod_base = OTHER; note = 2'-O-methoxyethyl adenosine
  modified_base 17: mod_base = OTHER; note = 2'-O-methoxyethyl guanosine
  modified_base 18: mod_base = OTHER; note = 2'-O-methoxyethyl thymidine
  modified_base 19: mod_base = OTHER; note = 2'-O-methoxyethyl guanosine
  modified_base 20: mod_base = OTHER; note = 2'-O-methoxyethyl 5-methylcytidine
  misc_feature 1..5: note = RNA
  misc_feature 6..9: note = DNA
  misc_feature 10: note = RNA
  misc_feature 11..15: note = DNA
  misc_feature 16..20: note = RNA
gcagaggtgaagcgaagtgc

SEQ ID NO: 221 - DNA, 20 bp, synthetic construct
  source 1..20: mol_type = other DNA
  modified_base 1: mod_base = OTHER; note = Locked nucleic acid with guanine base
  modified_base 2: mod_base = OTHER; note = 2'-O-methoxyethyl 5-methylcytidine
  modified_base 3: mod_base = OTHER; note = Locked nucleic acid with adenine base
  modified_base 4: mod_base = OTHER; note = 2'-O-methoxyethyl guanosine
  modified_base 5: mod_base = OTHER; note = 2'-O-methoxyethyl adenosine
  modified_base 10: mod_base = OTHER; note = 2'-O-methoxyethyl adenosine
  modified_base 13: mod_base = OTHER; note = 2'-deoxy 5-methylcytidine
  modified_base 16: mod_base = OTHER; note = 2'-O-methoxyethyl adenosine
  modified_base 17: mod_base = OTHER; note = 2'-O-methoxyethyl guanosine
  modified_base 18: mod_base = OTHER; note = 2'-O-methoxyethyl thymidine
  modified_base 19: mod_base = OTHER; note = 2'-O-methoxyethyl guanosine
  modified_base 20: mod_base = OTHER; note = 2'-O-methoxyethyl 5-methylcytidine
  misc_feature 1..5: note = RNA
  misc_feature 6..9: note = DNA
  misc_feature 10: note = RNA
  misc_feature 11..15: note = DNA
  misc_feature 16..20: note = RNA
gcagaggtgaagcgaagtgc

SEQ ID NO: 222 - DNA, 20 bp, synthetic construct
  source 1..20: mol_type = other DNA
  modified_base 1: mod_base = OTHER; note = Locked nucleic acid with guanine base
  modified_base 2: mod_base = OTHER; note = 2'-O-methoxyethyl 5-methylcytidine
  modified_base 3: mod_base = OTHER; note = 2'-O-methoxyethyl adenosine
  modified_base 4: mod_base = OTHER; note = Locked nucleic acid with guanine base
  modified_base 5: mod_base = OTHER; note = 2'-O-methoxyethyl adenosine
  modified_base 10: mod_base = OTHER; note = 2'-O-methoxyethyl adenosine
  modified_base 13: mod_base = OTHER; note = 2'-deoxy 5-methylcytidine
  modified_base 16: mod_base = OTHER; note = 2'-O-methoxyethyl adenosine
  modified_base 17: mod_base = OTHER; note = 2'-O-methoxyethyl guanosine
  modified_base 18: mod_base = OTHER; note = 2'-O-methoxyethyl thymidine
  modified_base 19: mod_base = OTHER; note = 2'-O-methoxyethyl guanosine
  modified_base 20: mod_base = OTHER; note = 2'-O-methoxyethyl 5-methylcytidine
  misc_feature 1..5: note = RNA
  misc_feature 6..9: note = DNA
  misc_feature 10: note = RNA
  misc_feature 11..15: note = DNA
  misc_feature 16..20: note = RNA
gcagaggtgaagcgaagtgc

SEQ ID NO: 223 - DNA, 20 bp, synthetic construct
  source 1..20: mol_type = other DNA
  modified_base 1: mod_base = OTHER; note = Locked nucleic acid with guanine base
  modified_base 2: mod_base = OTHER; note = 2'-O-methoxyethyl 5-methylcytidine
  modified_base 3: mod_base = OTHER; note = 2'-O-methoxyethyl adenosine
  modified_base 4: mod_base = OTHER; note = 2'-O-methoxyethyl guanosine
  modified_base 5: mod_base = OTHER; note = Locked nucleic acid with adenine base
  modified_base 10: mod_base = OTHER; note = 2'-O-methoxyethyl adenosine
  modified_base 13: mod_base = OTHER; note = 2'-deoxy 5-methylcytidine
  modified_base 16: mod_base = OTHER; note = 2'-O-methoxyethyl adenosine
  modified_base 17: mod_base = OTHER; note = 2'-O-methoxyethyl guanosine
  modified_base 18: mod_base = OTHER; note = 2'-O-methoxyethyl thymidine
  modified_base 19: mod_base = OTHER; note = 2'-O-methoxyethyl guanosine
  modified_base 20: mod_base = OTHER; note = 2'-O-methoxyethyl 5-methylcytidine
  misc_feature 1..5: note = RNA
  misc_feature 6..9: note = DNA
  misc_feature 10: note = RNA
  misc_feature 11..15: note = DNA
  misc_feature 16..20: note = RNA
gcagaggtgaagcgaagtgc

SEQ ID NO: 224 - DNA, 20 bp, synthetic construct
  source 1..20: mol_type = other DNA
  modified_base 1: mod_base = OTHER; note = 2'fluoro 2'-deoxy guanosine
  modified_base 2: mod_base = OTHER; note = 2'fluoro 2'-deoxy cytidine
  modified_base 3: mod_base = OTHER; note = 2'-fluoro 2'-deoxyadenosine
  modified_base 4: mod_base = OTHER; note = 2'fluoro 2'-deoxy guanosine
  modified_base 5: mod_base = OTHER; note = 2'-fluoro 2'-deoxyadenosine
  modified_base 13: mod_base = OTHER; note = 2'-deoxy 5-methylcytidine
  modified_base 16: mod_base = OTHER; note = 2'-O-methoxyethyl adenosine
  modified_base 17: mod_base = OTHER; note = 2'-O-methoxyethyl guanosine
  modified_base 18: mod_base = OTHER; note = 2'-O-methoxyethyl thymidine
  modified_base 19: mod_base = OTHER; note = 2'-O-methoxyethyl guanosine
  modified_base 20: mod_base = OTHER; note = 2'-O-methoxyethyl 5-methylcytidine
  misc_feature 1..5: note = RNA
  misc_feature 6..15: note = DNA
  misc_feature 16..20: note = RNA
gcagaggtgaagcgaagtgc

SEQ ID NO: 225 - DNA, 40 bp, synthetic construct; identical to SEQ ID NO: 69
  source 1..40: mol_type = other DNA
  modified_base 1: mod_base = OTHER; note = 2'fluoro 2'-deoxy guanosine
  modified_base 2: mod_base = OTHER; note = 2'fluoro 2'-deoxy cytidine
  modified_base 3: mod_base = OTHER; note = 2'-fluoro 2'-deoxyadenosine
  modified_base 4: mod_base = OTHER; note = 2'fluoro 2'-deoxy guanosine
  modified_base 5: mod_base = OTHER; note = 2'-fluoro 2'-deoxyadenosine
  modified_base 13: mod_base = OTHER; note = 2'-deoxy 5-methylcytidine
  modified_base 16: mod_base = OTHER; note = 2'-O-methoxyethyl adenosine
  modified_base 17: mod_base = OTHER; note = 2'-O-methoxyethyl guanosine
  modified_base 18: mod_base = OTHER; note = 2'-O-methoxyethyl thymidine
  modified_base 19: mod_base = OTHER; note = 2'-O-methoxyethyl guanosine
  modified_base 20: mod_base = OTHER; note = 2'-O-methoxyethyl 5-methylcytidine
  modified_base 21: mod_base = OTHER; note = 2'-O-methoxyethyl adenosine
  modified_base 22: mod_base = OTHER; note = 2'-O-methoxyethyl adenosine
  modified_base 23: mod_base = OTHER; note = 2'-O-methoxyethyl 5-methylcytidine
  modified_base 24: mod_base = OTHER; note = 2'-O-methoxyethyl adenosine
  modified_base 25: mod_base = OTHER; note = 2'-O-methoxyethyl 5-methylcytidine
  modified_base 26: mod_base = OTHER; note = 2'-O-methoxyethyl adenosine
  modified_base 27: mod_base = OTHER; note = 2'-O-methoxyethyl adenosine
  modified_base 28: mod_base = OTHER; note = 2'-O-methoxyethyl 5-methylcytidine
  modified_base 29: mod_base = OTHER; note = 2'-O-methoxyethyl adenosine
  modified_base 30: mod_base = OTHER; note = 2'-O-methoxyethyl 5-methylcytidine
  modified_base 31: mod_base = OTHER; note = 2'-O-methoxyethyl adenosine
  modified_base 32: mod_base = OTHER; note = 2'-O-methoxyethyl adenosine
  modified_base 33: mod_base = OTHER; note = 2'-O-methoxyethyl 5-methylcytidine
  modified_base 34: mod_base = OTHER; note = 2'-O-methoxyethyl adenosine
  modified_base 35: mod_base = OTHER; note = 2'-O-methoxyethyl 5-methylcytidine
  modified_base 36: mod_base = OTHER; note = 2'-O-methoxyethyl adenosine
  modified_base 37: mod_base = OTHER; note = 2'-O-methoxyethyl adenosine
  modified_base 38: mod_base = OTHER; note = 2'-O-methoxyethyl 5-methylcytidine
  modified_base 39: mod_base = OTHER; note = 2'-O-methoxyethyl adenosine
  modified_base 40: mod_base = OTHER; note = 2'-O-methoxyethyl 5-methylcytidine
  misc_feature 1..5: note = RNA
  misc_feature 6..15: note = DNA
  misc_feature 16..40: note = RNA

SEQ ID NO: 226 - DNA, 20 bp, synthetic construct
  source 1..20: mol_type = other DNA
  modified_base 1: mod_base = OTHER; note = 2'fluoro 2'-deoxy guanosine
  modified_base 2: mod_base = OTHER; note = 2'fluoro 2'-deoxy cytidine
  modified_base 3: mod_base = OTHER; note = 2'fluoro 2'-deoxy guanosine
  modified_base 4: mod_base = OTHER; note = 2'-fluoro 2'-deoxyadenosine
  modified_base 5: mod_base = OTHER; note = 2'-fluoro 2'-deoxyadenosine
  modified_base 9: mod_base = OTHER; note = 2'-deoxy 5-methylcytidine
  modified_base 11: mod_base = OTHER; note = 2'-deoxy 5-methylcytidine
  modified_base 13: mod_base = OTHER; note = 2'-deoxy 5-methylcytidine
  modified_base 16: mod_base = OTHER; note = 2'-O-methoxyethyl uridine
  modified_base 17: mod_base = OTHER; note = 2'-O-methoxyethyl 5-methylcytidine
  modified_base 18: mod_base = OTHER; note = 2'-O-methoxyethyl 5-methylcytidine
  modified_base 19: mod_base = OTHER; note = 2'-O-methoxyethyl guanosine
  modified_base 20: mod_base = OTHER; note = 2'-O-methoxyethyl guanosine
  misc_feature 1..5: note = RNA
  misc_feature 6..15: note = DNA
  misc_feature 16..20: note = RNA
gcgaagtgcacacggtccgg

SEQ ID NO: 227 - DNA, 20 bp, synthetic construct
  source 1..20: mol_type = other DNA
  modified_base 1: mod_base = OTHER; note = 2'fluoro 2'-deoxy guanosine
  modified_base 2: mod_base = OTHER; note = 2'fluoro 2'-deoxy cytidine
  modified_base 3: mod_base = OTHER; note = 2'-fluoro 2'-deoxyadenosine
  modified_base 4: mod_base = OTHER; note = 2'fluoro 2'-deoxy guanosine
  modified_base 5: mod_base = OTHER; note = 2'-fluoro 2'-deoxyadenosine
  modified_base 13: mod_base = OTHER; note = 2'-deoxy 5-methylcytidine
  modified_base 16: mod_base = OTHER; note = 2'-O-methoxyethyl adenosine
  modified_base 17: mod_base = OTHER; note = 2'-O-methoxyethyl guanosine
  modified_base 18: mod_base = OTHER; note = 2'-O-methoxyethyl uridine
  modified_base 19: mod_base = OTHER; note = 2'-O-methoxyethyl guanosine
  modified_base 20: mod_base = OTHER; note = 2'-O-methoxyethyl 5-methylcytidine
  misc_feature 1..5: note = RNA
  misc_feature 6..15: note = DNA
  misc_feature 16..20: note = RNA
gcagaggtgaagcgaagtgc

SEQ ID NO: 228 - DNA, 20 bp, synthetic construct
  source 1..20: mol_type = other DNA
  modified_base 1: mod_base = OTHER; note = Locked nucleic acid with guanine base
  modified_base 2: mod_base = OTHER; note = 2'fluoro 2'-deoxy cytidine
  modified_base 3: mod_base = OTHER; note = 2'-fluoro 2'-deoxyadenosine
  modified_base 4: mod_base = OTHER; note = 2'fluoro 2'-deoxy guanosine
  modified_base 5: mod_base = OTHER; note = 2'-fluoro 2'-deoxyadenosine
  modified_base 13: mod_base = OTHER; note = 2'-deoxy 5-methylcytidine
  modified_base 16: mod_base = OTHER; note = 2'-O-methoxyethyl adenosine
  modified_base 17: mod_base = OTHER; note = 2'-O-methoxyethyl guanosine
  modified_base 18: mod_base = OTHER; note = 2'-O-methoxyethyl uridine
  modified_base 19: mod_base = OTHER; note = 2'-O-methoxyethyl guanosine
  modified_base 20: mod_base = OTHER; note = 2'-O-methoxyethyl 5-methylcytidine
  misc_feature 1..5: note = RNA
  misc_feature 6..15: note = DNA
  misc_feature 16..20: note = RNA
gcagaggtgaagcgaagtgc

SEQ ID NO: 229 - DNA, 20 bp, synthetic construct
  source 1..20: mol_type = other DNA
  modified_base 1: mod_base = OTHER; note = Locked nucleic acid with guanine base
  modified_base 2: mod_base = OTHER; note = Locked nucleic acid with cytosine base
  modified_base 3: mod_base = OTHER; note = 2'-fluoro 2'-deoxyadenosine
  modified_base 4: mod_base = OTHER; note = 2'fluoro 2'-deoxy guanosine
  modified_base 5: mod_base = OTHER; note = 2'-fluoro 2'-deoxyadenosine
  modified_base 13: mod_base = OTHER; note = 2'-deoxy 5-methylcytidine
  modified_base 16: mod_base = OTHER; note = 2'-O-methoxyethyl adenosine
  modified_base 17: mod_base = OTHER; note = 2'-O-methoxyethyl guanosine
  modified_base 18: mod_base = OTHER; note = 2'-O-methoxyethyl uridine
  modified_base 19: mod_base = OTHER; note = 2'-O-methoxyethyl guanosine
  modified_base 20: mod_base = OTHER; note = 2'-O-methoxyethyl 5-methylcytidine
  misc_feature 1..5: note = RNA
  misc_feature 6..15: note = DNA
  misc_feature 16..20: note = RNA
gcagaggtgaagcgaagtgc

SEQ ID NO: 230 - DNA, 20 bp, synthetic construct
  source 1..20: mol_type = other DNA
  modified_base 1: mod_base = OTHER; note = Locked nucleic acid with guanine base
  modified_base 2: mod_base = OTHER; note = 2'fluoro 2'-deoxy cytidine
  modified_base 3: mod_base = OTHER; note = Locked nucleic acid with adenine base
  modified_base 4: mod_base = OTHER; note = 2'fluoro 2'-deoxy guanosine
  modified_base 5: mod_base = OTHER; note = 2'-fluoro 2'-deoxyadenosine
  modified_base 13: mod_base = OTHER; note = 2'-deoxy 5-methylcytidine
  modified_base 16: mod_base = OTHER; note = 2'-O-methoxyethyl adenosine
  modified_base 17: mod_base = OTHER; note = 2'-O-methoxyethyl guanosine
  modified_base 18: mod_base = OTHER; note = 2'-O-methoxyethyl uridine
  modified_base 19: mod_base = OTHER; note = 2'-O-methoxyethyl guanosine
  modified_base 20: mod_base = OTHER; note = 2'-O-methoxyethyl 5-methylcytidine
  misc_feature 1..5: note = RNA
  misc_feature 6..15: note = DNA
  misc_feature 16..20: note = RNA
gcagaggtgaagcgaagtgc

SEQ ID NO: 231 - DNA, 20 bp, synthetic construct
  source 1..20: mol_type = other DNA
  modified_base 1: mod_base = OTHER; note = Locked nucleic acid with guanine base
  modified_base 2: mod_base = OTHER; note = 2'fluoro 2'-deoxy cytidine
  modified_base 3: mod_base = OTHER; note = 2'-fluoro 2'-deoxyadenosine
  modified_base 4: mod_base = OTHER; note = Locked nucleic acid with guanine base
  modified_base 5: mod_base = OTHER; note = 2'-fluoro 2'-deoxyadenosine
  modified_base 13: mod_base = OTHER; note = 2'-deoxy 5-methylcytidine
  modified_base 16: mod_base = OTHER; note = 2'-O-methoxyethyl adenosine
  modified_base 17: mod_base = OTHER; note = 2'-O-methoxyethyl guanosine
  modified_base 18: mod_base = OTHER; note = 2'-O-methoxyethyl uridine
  modified_base 19: mod_base = OTHER; note = 2'-O-methoxyethyl guanosine
  modified_base 20: mod_base = OTHER; note = 2'-O-methoxyethyl 5-methylcytidine
  misc_feature 1..5: note = RNA
  misc_feature 6..15: note = DNA
  misc_feature 16..20: note = RNA
gcagaggtgaagcgaagtgc

SEQ ID NO: 232 - DNA, 20 bp, synthetic construct
  source 1..20: mol_type = other DNA
  modified_base 1: mod_base = OTHER; note = Locked nucleic acid with guanine base
  modified_base 2: mod_base = OTHER; note = 2'fluoro 2'-deoxy cytidine
  modified_base 3: mod_base = OTHER; note = 2'-fluoro 2'-deoxyadenosine
  modified_base 4: mod_base = OTHER; note = 2'fluoro 2'-deoxy guanosine
  modified_base 5: mod_base = OTHER; note = Locked nucleic acid with adenine base
  modified_base 13: mod_base = OTHER; note = 2'-deoxy 5-methylcytidine
  modified_base 16: mod_base = OTHER; note = 2'-O-methoxyethyl adenosine
  modified_base 17: mod_base = OTHER; note = 2'-O-methoxyethyl guanosine
  modified_base 18: mod_base = OTHER; note = 2'-O-methoxyethyl uridine
  modified_base 19: mod_base = OTHER; note = 2'-O-methoxyethyl guanosine
  modified_base 20: mod_base = OTHER; note = 2'-O-methoxyethyl 5-methylcytidine
  misc_feature 1..5: note = RNA
  misc_feature 6..15: note = DNA
  misc_feature 16..20: note = RNA
gcagaggtgaagcgaagtgc

SEQ ID NO: 233 - DNA, 20 bp, synthetic construct
  source 1..20: mol_type = other DNA
  modified_base 1: mod_base = OTHER; note = Locked nucleic acid with guanine base
  modified_base 2: mod_base = OTHER; note = Locked nucleic acid with cytosine base
  modified_base 3: mod_base = OTHER; note = Locked nucleic acid with adenine base
  modified_base 4: mod_base = OTHER; note = 2'fluoro 2'-deoxy guanosine
  modified_base 5: mod_base = OTHER; note = 2'-fluoro 2'-deoxyadenosine
  modified_base 13: mod_base = OTHER; note = 2'-deoxy 5-methylcytidine
  modified_base 16: mod_base = OTHER; note = 2'-O-methoxyethyl adenosine
  modified_base 17: mod_base = OTHER; note = 2'-O-methoxyethyl guanosine
  modified_base 18: mod_base = OTHER; note = 2'-O-methoxyethyl uridine
  modified_base 19: mod_base = OTHER; note = 2'-O-methoxyethyl guanosine
  modified_base 20: mod_base = OTHER; note = 2'-O-methoxyethyl 5-methylcytidine
  misc_feature 1..5: note = RNA
  misc_feature 6..15: note = DNA
  misc_feature 16..20: note = RNA
gcagaggtgaagcgaagtgc

SEQ ID NO: 234 - DNA, 20 bp, synthetic construct
  source 1..20: mol_type = other DNA
  modified_base 1: mod_base = OTHER; note = Locked nucleic acid with guanine base
  modified_base 2: mod_base = OTHER; note = 2'fluoro 2'-deoxy cytidine
  modified_base 3: mod_base = OTHER; note = 2'-O-methoxyethyl adenosine
  modified_base 4: mod_base = OTHER; note = 2'fluoro 2'-deoxy guanosine
  modified_base 5: mod_base = OTHER; note = 2'-O-methoxyethyl adenosine
  modified_base 13: mod_base = OTHER; note = 2'-deoxy 5-methylcytidine
  modified_base 16: mod_base = OTHER; note = 2'-O-methoxyethyl adenosine
  modified_base 17: mod_base = OTHER; note = 2'-O-methoxyethyl guanosine
  modified_base 18: mod_base = OTHER; note = 2'-O-methoxyethyl uridine
  modified_base 19: mod_base = OTHER; note = 2'-O-methoxyethyl guanosine
  modified_base 20: mod_base = OTHER; note = 2'-O-methoxyethyl 5-methylcytidine
  misc_feature 1..5: note = RNA
  misc_feature 6..15: note = DNA
  misc_feature 16..20: note = RNA
gcagaggtgaagcgaagtgc

SEQ ID NO: 235 - DNA, 20 bp, synthetic construct
  source 1..20: mol_type = other DNA
  modified_base 1: mod_base = OTHER; note = Locked nucleic acid with guanine base
  modified_base 2: mod_base = OTHER; note = 2'-O-methoxyethyl 5-methylcytidine
  modified_base 3: mod_base = OTHER; note = 2'-fluoro 2'-deoxyadenosine
  modified_base 4: mod_base = OTHER; note = 2'-O-methoxyethyl guanosine
  modified_base 5: mod_base = OTHER; note = 2'-fluoro 2'-deoxyadenosine
  modified_base 13: mod_base = OTHER; note = 2'-deoxy 5-methylcytidine
  modified_base 16: mod_base = OTHER; note = 2'-O-methoxyethyl adenosine
  modified_base 17: mod_base = OTHER; note = 2'-O-methoxyethyl guanosine
  modified_base 18: mod_base = OTHER; note = 2'-O-methoxyethyl uridine
  modified_base 19: mod_base = OTHER; note = 2'-O-methoxyethyl guanosine
  modified_base 20: mod_base = OTHER; note = 2'-O-methoxyethyl 5-methylcytidine
  misc_feature 1..5: note = RNA
  misc_feature 6..15: note = DNA
  misc_feature 16..20: note = RNA
gcagaggtgaagcgaagtgc

SEQ ID NO: 236 - DNA, 20 bp, synthetic construct
  source 1..20: mol_type = other DNA
  modified_base 1: mod_base = OTHER; note = Locked nucleic acid with guanine base
  modified_base 2: mod_base = OTHER; note = Locked nucleic acid with cytosine base
  modified_base 3: mod_base = OTHER; note = 2'-fluoro 2'-deoxyadenosine
  modified_base 4: mod_base = OTHER; note = 2'-O-methoxyethyl guanosine
  modified_base 5: mod_base = OTHER; note = 2'-fluoro 2'-deoxyadenosine
  modified_base 13: mod_base = OTHER; note = 2'-deoxy 5-methylcytidine
  modified_base 16: mod_base = OTHER; note = 2'-O-methoxyethyl adenosine
  modified_base 17: mod_base = OTHER; note = 2'-O-methoxyethyl guanosine
  modified_base 18: mod_base = OTHER; note = 2'-O-methoxyethyl uridine
  modified_base 19: mod_base = OTHER; note = 2'-O-methoxyethyl guanosine
  modified_base 20: mod_base = OTHER; note = 2'-O-methoxyethyl 5-methylcytidine
  misc_feature 1..5: note = RNA
  misc_feature 6..15: note = DNA
  misc_feature 16..20: note = RNA
gcagaggtgaagcgaagtgc

SEQ ID NO: 237 - DNA, 20 bp, synthetic construct
  source 1..20: mol_type = other DNA
  modified_base 1: mod_base = OTHER; note = Locked nucleic acid with guanine base
  modified_base 2: mod_base = OTHER; note = Locked nucleic acid with cytosine base
  modified_base 3: mod_base = OTHER; note = 2'-O-methoxyethyl adenosine
  modified_base 4: mod_base = OTHER; note = 2'fluoro 2'-deoxy guanosine
  modified_base 5: mod_base = OTHER; note = 2'-O-methoxyethyl adenosine
  modified_base 13: mod_base = OTHER; note = 2'-deoxy 5-methylcytidine
  modified_base 16: mod_base = OTHER; note = 2'-O-methoxyethyl adenosine
  modified_base 17: mod_base = OTHER; note = 2'-O-methoxyethyl guanosine
  modified_base 18: mod_base = OTHER; note = 2'-O-methoxyethyl uridine
  modified_base 19: mod_base = OTHER; note = 2'-O-methoxyethyl guanosine
  modified_base 20: mod_base = OTHER; note = 2'-O-methoxyethyl 5-methylcytidine
  misc_feature 1..5: note = RNA
  misc_feature 6..15: note = DNA
  misc_feature 16..20: note = RNA
gcagaggtgaagcgaagtgc

SEQ ID NO: 238 - DNA, 20 bp, synthetic construct
  source 1..20: mol_type = other DNA
  modified_base 1: mod_base = OTHER; note = Locked nucleic acid with guanine base
  modified_base 2: mod_base = OTHER; note = 2'-O-methoxyethyl 5-methylcytidine
  modified_base 3: mod_base = OTHER; note = 2'-O-methoxyethyl adenosine
  modified_base 4: mod_base = OTHER; note = 2'-O-methoxyethyl guanosine
  modified_base 5: mod_base = OTHER; note = 2'-O-methoxyethyl adenosine
  modified_base 13: mod_base = OTHER; note = 2'-deoxy 5-methylcytidine
  modified_base 16: mod_base = OTHER; note = 2'-O-methoxyethyl adenosine
  modified_base 17: mod_base = OTHER; note = 2'-O-methoxyethyl guanosine
  modified_base 18: mod_base = OTHER; note = 2'-O-methoxyethyl uridine
  modified_base 19: mod_base = OTHER; note = 2'-O-methoxyethyl guanosine
  modified_base 20: mod_base = OTHER; note = 2'-O-methoxyethyl 5-methylcytidine
  misc_feature 1..5: note = RNA
  misc_feature 6..15: note = DNA
  misc_feature 16..20: note = RNA
gcagaggtgaagcgaagtgc

SEQ ID NO: 239 - DNA, 20 bp, synthetic construct
  source 1..20: mol_type = other DNA
  modified_base 1: mod_base = OTHER; note = Locked nucleic acid with guanine base
  modified_base 2: mod_base = OTHER; note = Locked nucleic acid with cytosine base
  modified_base 3: mod_base = OTHER; note = 2'-O-methoxyethyl adenosine
  modified_base 4: mod_base = OTHER; note = 2'-O-methoxyethyl guanosine
  modified_base 5: mod_base = OTHER; note = 2'-O-methoxyethyl adenosine
  modified_base 13: mod_base = OTHER; note = 2'-deoxy 5-methylcytidine
  modified_base 16: mod_base = OTHER; note = 2'-O-methoxyethyl adenosine
  modified_base 17: mod_base = OTHER; note = 2'-O-methoxyethyl guanosine
  modified_base 18: mod_base = OTHER; note = 2'-O-methoxyethyl uridine
  modified_base 19: mod_base = OTHER; note = 2'-O-methoxyethyl guanosine
  modified_base 20: mod_base = OTHER; note = 2'-O-methoxyethyl 5-methylcytidine
  misc_feature 1..5: note = RNA
  misc_feature 6..15: note = DNA
  misc_feature 16..20: note = RNA
gcagaggtgaagcgaagtgc

SEQ ID NO: 240 - DNA, 20 bp, synthetic construct
  source 1..20: mol_type = other DNA
  modified_base 1: mod_base = OTHER; note = Locked nucleic acid with guanine base
  modified_base 2: mod_base = OTHER; note = Locked nucleic acid with cytosine base
  modified_base 3: mod_base = OTHER; note = Locked nucleic acid with adenine base
  modified_base 4: mod_base = OTHER; note = 2'-O-methoxyethyl guanosine
  modified_base 5: mod_base = OTHER; note = 2'-O-methoxyethyl adenosine
  modified_base 13: mod_base = OTHER; note = 2'-deoxy 5-methylcytidine
  modified_base 16: mod_base = OTHER; note = 2'-O-methoxyethyl adenosine
  modified_base 17: mod_base = OTHER; note = 2'-O-methoxyethyl guanosine
  modified_base 18: mod_base = OTHER; note = 2'-O-methoxyethyl uridine
  modified_base 19: mod_base = OTHER; note = 2'-O-methoxyethyl guanosine
  modified_base 20: mod_base = OTHER; note = 2'-O-methoxyethyl 5-methylcytidine
  misc_feature 1..5: note = RNA
  misc_feature 6..15: note = DNA
  misc_feature 16..20: note = RNA
gcagaggtgaagcgaagtgc

SEQ ID NO: 241 - DNA, 20 bp, synthetic construct
  source 1..20: mol_type = other DNA
  modified_base 1: mod_base = OTHER; note = Locked nucleic acid with guanine base
  modified_base 2: mod_base = OTHER; note = Locked nucleic acid with cytosine base
  modified_base 3: mod_base = OTHER; note = Locked nucleic acid with adenine base
  modified_base 4: mod_base = OTHER; note = Locked nucleic acid with guanine base
  modified_base 5: mod_base = OTHER; note = 2'-O-methoxyethyl adenosine
  modified_base 13: mod_base = OTHER; note = 2'-deoxy 5-methylcytidine
  modified_base 16: mod_base = OTHER; note = 2'-O-methoxyethyl adenosine
  modified_base 17: mod_base = OTHER; note = 2'-O-methoxyethyl guanosine
  modified_base 18: mod_base = OTHER; note = 2'-O-methoxyethyl uridine
  modified_base 19: mod_base = OTHER; note = 2'-O-methoxyethyl guanosine
  modified_base 20: mod_base = OTHER; note = 2'-O-methoxyethyl 5-methylcytidine
  misc_feature 1..5: note = RNA
  misc_feature 6..15: note = DNA
  misc_feature 16..20: note = RNA
gcagaggtgaagcgaagtgc

SEQ ID NO: 242 - DNA, 20 bp, synthetic construct
  source 1..20: mol_type = other DNA
  modified_base 1: mod_base = OTHER; note = 2'-O-methoxyethyl guanosine
  modified_base 2: mod_base = OTHER; note = 2'-O-methoxyethyl guanosine
  modified_base 3: mod_base = OTHER; note = 2'-O-methoxyethyl adenosine
  modified_base 4: mod_base = OTHER; note = 2'-O-methoxyethyl guanosine
  modified_base 5: mod_base = OTHER; note = 2'-O-methoxyethyl adenosine
  modified_base 13: mod_base = OTHER; note = 2'-deoxy 5-methylcytidine
  modified_base 16: mod_base = OTHER; note = 2'-O-methoxyethyl adenosine
  modified_base 17: mod_base = OTHER; note = 2'-O-methoxyethyl guanosine
  modified_base 18: mod_base = OTHER; note = 2'-O-methoxyethyl thymidine
  modified_base 19: mod_base = OTHER; note = 2'-O-methoxyethyl guanosine
  modified_base 20: mod_base = OTHER; note = 2'-O-methoxyethyl 5-methylcytidine
  misc_feature 1..5: note = RNA
  misc_feature 6..15: note = DNA
  misc_feature 16..20: note = RNA
ggagaggtgaagcgaagtgc

SEQ ID NO: 243 - DNA, 20 bp, synthetic construct
  source 1..20: mol_type = other DNA
  modified_base 1: mod_base = OTHER; note = 2'-O-methoxyethyl guanosine
  modified_base 2: mod_base = OTHER; note = 2'-O-methoxyethyl 5-methylcytidine
  modified_base 3: mod_base = OTHER; note = 2'-O-methoxyethyl thymidine
  modified_base 4: mod_base = OTHER; note = 2'-O-methoxyethyl guanosine
  modified_base 5: mod_base = OTHER; note = 2'-O-methoxyethyl adenosine
  modified_base 13: mod_base = OTHER; note = 2'-deoxy 5-methylcytidine
  modified_base 16: mod_base = OTHER; note = 2'-O-methoxyethyl adenosine
  modified_base 17: mod_base = OTHER; note = 2'-O-methoxyethyl guanosine
  modified_base 18: mod_base = OTHER; note = 2'-O-methoxyethyl thymidine
  modified_base 19: mod_base = OTHER; note = 2'-O-methoxyethyl guanosine
  modified_base 20: mod_base = OTHER; note = 2'-O-methoxyethyl 5-methylcytidine
  misc_feature 1..5: note = RNA
  misc_feature 6..15: note = DNA
  misc_feature 16..20: note = RNA
gctgaggtgaagcgaagtgc

SEQ ID NO: 244 - DNA, 20 bp, synthetic construct
  source 1..20: mol_type = other DNA
  modified_base 1: mod_base = OTHER; note = 2'-O-methoxyethyl guanosine
  modified_base 2: mod_base = OTHER; note = 2'-O-methoxyethyl 5-methylcytidine
  modified_base 3: mod_base = OTHER; note = 2'-O-methoxyethyl adenosine
  modified_base 4: mod_base = OTHER; note = 2'-O-methoxyethyl 5-methylcytidine
  modified_base 5: mod_base = OTHER; note = 2'-O-methoxyethyl adenosine
  modified_base 13: mod_base = OTHER; note = 2'-deoxy 5-methylcytidine
  modified_base 16: mod_base = OTHER; note = 2'-O-methoxyethyl adenosine
  modified_base 17: mod_base = OTHER; note = 2'-O-methoxyethyl guanosine
  modified_base 18: mod_base = OTHER; note = 2'-O-methoxyethyl thymidine
  modified_base 19: mod_base = OTHER; note = 2'-O-methoxyethyl guanosine
  modified_base 20: mod_base = OTHER; note = 2'-O-methoxyethyl 5-methylcytidine
  misc_feature 1..5: note = RNA
  misc_feature 6..15: note = DNA
  misc_feature 16..20: note = RNA
gcacaggtgaagcgaagtgc

SEQ ID NO: 245 - DNA, 20 bp, synthetic construct
  source 1..20: mol_type = other DNA
  modified_base 1: mod_base = OTHER; note = 2'-O-methoxyethyl guanosine
  modified_base 2: mod_base = OTHER; note = 2'-O-methoxyethyl 5-methylcytidine
  modified_base 3: mod_base = OTHER; note = 2'-O-methoxyethyl adenosine
  modified_base 4: mod_base = OTHER; note = 2'-O-methoxyethyl guanosine
  modified_base 5: mod_base = OTHER; note = 2'-O-methoxyethyl thymidine
  modified_base 13: mod_base = OTHER; note = 2'-deoxy 5-methylcytidine
  modified_base 16: mod_base = OTHER; note = 2'-O-methoxyethyl adenosine
  modified_base 17: mod_base = OTHER; note = 2'-O-methoxyethyl guanosine
  modified_base 18: mod_base = OTHER; note = 2'-O-methoxyethyl thymidine
  modified_base 19: mod_base = OTHER; note = 2'-O-methoxyethyl guanosine
  modified_base 20: mod_base = OTHER; note = 2'-O-methoxyethyl 5-methylcytidine
  misc_feature 1..5: note = RNA
  misc_feature 6..15: note = DNA
  misc_feature 16..20: note = RNA
gcagtggtgaagcgaagtgc

SEQ ID NO: 246 - DNA, 20 bp, synthetic construct
  source 1..20: mol_type = other DNA
  modified_base 1: mod_base = OTHER; note = 2'-O-methoxyethyl guanosine
  modified_base 2: mod_base = OTHER; note = 2'-O-methoxyethyl 5-methylcytidine
  modified_base 3: mod_base = OTHER; note = 2'-O-methoxyethyl adenosine
  modified_base 4: mod_base = OTHER; note = 2'-O-methoxyethyl guanosine
  modified_base 5: mod_base = OTHER; note = 2'-O-methoxyethyl adenosine
  modified_base 6: mod_base = OTHER; note = 2'-deoxy 5-methylcytidine
  modified_base 13: mod_base = OTHER; note = 2'-deoxy 5-methylcytidine
  modified_base 16: mod_base = OTHER; note = 2'-O-methoxyethyl adenosine
  modified_base 17: mod_base = OTHER; note = 2'-O-methoxyethyl guanosine
  modified_base 18: mod_base = OTHER; note = 2'-O-methoxyethyl thymidine
  modified_base 19: mod_base = OTHER; note = 2'-O-methoxyethyl guanosine
  modified_base 20: mod_base = OTHER; note = 2'-O-methoxyethyl 5-methylcytidine
  misc_feature 1..5: note = RNA
  misc_feature 6..15: note = DNA
  misc_feature 16..20: note = RNA
gcagacgtgaagcgaagtgc

SEQ ID NO: 247 - DNA, 20 bp, synthetic construct
  source 1..20: mol_type = other DNA
  modified_base 1: mod_base = OTHER; note = 2'-O-methoxyethyl guanosine
  modified_base 2: mod_base = OTHER; note = 2'-O-methoxyethyl 5-methylcytidine
  modified_base 3: mod_base = OTHER; note = 2'-O-methoxyethyl adenosine
  modified_base 4: mod_base = OTHER; note = 2'-O-methoxyethyl guanosine
  modified_base 5: mod_base = OTHER; note = 2'-O-methoxyethyl adenosine
  modified_base 7: mod_base = OTHER; note = 2'-deoxy 5-methylcytidine
  modified_base 13: mod_base = OTHER; note = 2'-deoxy 5-methylcytidine
  modified_base 16: mod_base = OTHER; note = 2'-O-methoxyethyl adenosine
  modified_base 17: mod_base = OTHER; note = 2'-O-methoxyethyl guanosine
  modified_base 18: mod_base = OTHER; note = 2'-O-methoxyethyl thymidine
  modified_base 19: mod_base = OTHER; note = 2'-O-methoxyethyl guanosine
  modified_base 20: mod_base = OTHER; note = 2'-O-methoxyethyl 5-methylcytidine
  misc_feature 1..5: note = RNA
  misc_feature 6..15: note = DNA
  misc_feature 16..20: note = RNA
gcagagctgaagcgaagtgc

SEQ ID NO: 248 - DNA, 20 bp, synthetic construct
  source 1..20: mol_type = other DNA
  modified_base 1: mod_base = OTHER; note = 2'-O-methoxyethyl 5-methylcytidine
  modified_base 2: mod_base = OTHER; note = 2'-O-methoxyethyl 5-methylcytidine
  modified_base 3: mod_base = OTHER; note = 2'-O-methoxyethyl adenosine
  modified_base 4: mod_base = OTHER; note = 2'-O-methoxyethyl guanosine
  modified_base 5: mod_base = OTHER; note = 2'-O-methoxyethyl adenosine
  modified_base 13: mod_base = OTHER; note = 2'-deoxy 5-methylcytidine
  modified_base 16: mod_base = OTHER; note = 2'-O-methoxyethyl adenosine
  modified_base 17: mod_base = OTHER; note = 2'-O-methoxyethyl guanosine
  modified_base 18: mod_base = OTHER; note = 2'-O-methoxyethyl thymidine
  modified_base 19: mod_base = OTHER; note = 2'-O-methoxyethyl guanosine
  modified_base 20: mod_base = OTHER; note = 2'-O-methoxyethyl 5-methylcytidine
  misc_feature 1..5: note = RNA
  misc_feature 6..15: note = DNA
  misc_feature 16..20: note = RNA
ccagaggtgaagcgaagtgc

SEQ ID NO: 249 - DNA, 20 bp, synthetic construct
  source 1..20: mol_type = other DNA
  modified_base 1: mod_base = OTHER; note = 2'-F-ANA with guanine base
  modified_base 2: mod_base = OTHER; note = 2'-F-ANA with cytosine base
  modified_base 3: mod_base = OTHER; note = 2'-F-ANA with adenine base
  modified_base 4: mod_base = OTHER; note = 2'-F-ANA with guanine base
  modified_base 5: mod_base = OTHER; note = 2'-F-ANA with adenine base
  modified_base 13: mod_base = OTHER; note = 2'-deoxy 5-methylcytidine
  modified_base 16: mod_base = OTHER; note = 2'-O-methoxyethyl adenosine
  modified_base 17: mod_base = OTHER; note = 2'-O-methoxyethyl guanosine
  modified_base 18: mod_base = OTHER; note = 2'-O-methoxyethyl uridine
  modified_base 19: mod_base = OTHER; note = 2'-O-methoxyethyl guanosine
  modified_base 20: mod_base = OTHER; note = 2'-O-methoxyethyl 5-methylcytidine
  misc_feature 1..5: note = RNA
  misc_feature 6..15: note = DNA
  misc_feature 16..20: note = RNA
gcagaggtgaagcgaagtgc

SEQ ID NO: 250 - DNA, 20 bp, synthetic construct
  source 1..20: mol_type = other DNA
  modified_base 1: mod_base = OTHER; note = 2'-O-methoxyethyl guanosine
  modified_base 2: mod_base = OTHER; note = 2'-O-methoxyethyl 5-methylcytidine
  modified_base 3: mod_base = OTHER; note = 2'-F-ANA with adenine base
  modified_base 4: mod_base = OTHER; note = 2'-F-ANA with guanine base
  modified_base 5: mod_base = OTHER; note = 2'-F-ANA with adenine base
  modified_base 13: mod_base = OTHER; note = 2'-deoxy 5-methylcytidine
  modified_base 16: mod_base = OTHER; note = 2'-O-methoxyethyl adenosine
  modified_base 17: mod_base = OTHER; note = 2'-O-methoxyethyl guanosine
  modified_base 18: mod_base = OTHER; note = 2'-O-methoxyethyl uridine
  modified_base 19: mod_base = OTHER; note = 2'-O-methoxyethyl guanosine
  modified_base 20: mod_base = OTHER; note = 2'-O-methoxyethyl 5-methylcytidine
  misc_feature 1..5: note = RNA
  misc_feature 6..15: note = DNA
  misc_feature 16..20: note = RNA
gcagaggtgaagcgaagtgc

SEQ ID NO: 251 - DNA, 20 bp, synthetic construct
  source 1..20: mol_type = other DNA
  modified_base 1: mod_base = OTHER; note = Locked nucleic acid with guanine base
  modified_base 2: mod_base = OTHER; note = Locked nucleic acid with cytosine base
  modified_base 3: mod_base = OTHER; note = 2'-O-methoxyethyl adenosine
  modified_base 4: mod_base = OTHER; note = 2'-O-methoxyethyl guanosine
  modified_base 5: mod_base = OTHER; note = 2'-O-methoxyethyl adenosine
  modified_base 13: mod_base = OTHER; note = 2'-deoxy 5-methylcytidine
  modified_base 16: mod_base = OTHER; note = 2'-O-methoxyethyl adenosine
  modified_base 17: mod_base = OTHER; note = 2'-O-methoxyethyl guanosine
  modified_base 18: mod_base = OTHER; note = 2'-O-methoxyethyl thymidine
  modified_base 19: mod_base = OTHER; note = 2'-O-methoxyethyl guanosine
  modified_base 20: mod_base = OTHER; note = 2'-O-methoxyethyl 5-methylcytidine
  misc_feature 1..5: note = RNA
  misc_feature 6..15: note = DNA
  misc_feature 16..20: note = RNA
gcagaggtgaagcgaagtgc

SEQ ID NO: 252 - DNA, 20 bp, synthetic construct
  source 1..20: mol_type = other DNA
  modified_base 1: mod_base = OTHER; note = Locked nucleic acid with guanine base
  modified_base 2: mod_base = OTHER; note = 2'-O-methoxyethyl 5-methylcytidine
  modified_base 3: mod_base = OTHER; note = Locked nucleic acid with adenine base
  modified_base 4: mod_base = OTHER; note = 2'-O-methoxyethyl guanosine
  modified_base 5: mod_base = OTHER; note = 2'-O-methoxyethyl adenosine
  modified_base 13: mod_base = OTHER; note = 2'-deoxy 5-methylcytidine
  modified_base 16: mod_base = OTHER; note = 2'-O-methoxyethyl adenosine
  modified_base 17: mod_base = OTHER; note = 2'-O-methoxyethyl guanosine
  modified_base 18: mod_base = OTHER; note = 2'-O-methoxyethyl thymidine
  modified_base 19: mod_base = OTHER; note = 2'-O-methoxyethyl guanosine
  modified_base 20: mod_base = OTHER; note = 2'-O-methoxyethyl 5-methylcytidine
  misc_feature 1..5: note = RNA
  misc_feature 6..15: note = DNA
  misc_feature 16..20: note = RNA
gcagaggtgaagcgaagtgc

SEQ ID NO: 253 - DNA, 20 bp, synthetic construct
  source 1..20: mol_type = other DNA
  modified_base 1: mod_base = OTHER; note = Locked nucleic acid with guanine base
  modified_base 2: mod_base = OTHER; note = 2'-O-methoxyethyl 5-methylcytidine
  modified_base 3: mod_base = OTHER; note = 2'-O-methoxyethyl adenosine
  modified_base 4: mod_base = OTHER; note = Locked nucleic acid with guanine base
  modified_base 5: mod_base = OTHER; note = 2'-O-methoxyethyl adenosine
  modified_base 13: mod_base = OTHER; note = 2'-deoxy 5-methylcytidine
  modified_base 16: mod_base = OTHER; note = 2'-O-methoxyethyl adenosine
  modified_base 17: mod_base = OTHER; note = 2'-O-methoxyethyl guanosine
  modified_base 18: mod_base = OTHER; note = 2'-O-methoxyethyl thymidine
  modified_base 19: mod_base = OTHER; note = 2'-O-methoxyethyl guanosine
  modified_base 20: mod_base = OTHER; note = 2'-O-methoxyethyl 5-methylcytidine
  misc_feature 1..5: note = RNA
  misc_feature 6..15: note = DNA
  misc_feature 16..20: note = RNA
gcagaggtgaagcgaagtgc

SEQ ID NO: 254 - DNA, 20 bp, synthetic construct
  source 1..20: mol_type = other DNA
  modified_base 1: mod_base = OTHER; note = Locked nucleic acid with guanine base
  modified_base 2: mod_base = OTHER; note = 2'-O-methoxyethyl 5-methylcytidine
  modified_base 3: mod_base = OTHER; note = 2'-O-methoxyethyl adenosine
  modified_base 4: mod_base = OTHER; note = 2'-O-methoxyethyl guanosine
  modified_base 5: mod_base = OTHER; note = Locked nucleic acid with adenine base
  modified_base 13: mod_base = OTHER; note = 2'-deoxy 5-methylcytidine
  modified_base 16: mod_base = OTHER; note = 2'-O-methoxyethyl adenosine
  modified_base 17: mod_base = OTHER; note = 2'-O-methoxyethyl guanosine
  modified_base 18: mod_base = OTHER; note = 2'-O-methoxyethyl thymidine
  modified_base 19: mod_base = OTHER; note = 2'-O-methoxyethyl guanosine
  modified_base 20: mod_base = OTHER; note = 2'-O-methoxyethyl 5-methylcytidine
  misc_feature 1..5: note = RNA
  misc_feature 6..15: note = DNA
  misc_feature 16..20: note = RNA
gcagaggtgaagcgaagtgc

SEQ ID NO: 255 - DNA, 20 bp, synthetic construct
  source 1..20: mol_type = other DNA
  modified_base 1: mod_base = OTHER; note = 2'-O-methoxyethyl guanosine
  modified_base 2: mod_base = OTHER; note = Locked nucleic acid with cytosine base
  modified_base 3: mod_base = OTHER; note = Locked nucleic acid with adenine base
  modified_base 4: mod_base = OTHER; note = 2'-O-methoxyethyl guanosine
  modified_base 5: mod_base = OTHER; note = 2'-O-methoxyethyl adenosine
  modified_base 13: mod_base = OTHER; note = 2'-deoxy 5-methylcytidine
  modified_base 16: mod_base = OTHER; note = 2'-O-methoxyethyl adenosine
  modified_base 17: mod_base = OTHER; note = 2'-O-methoxyethyl guanosine
  modified_base 18: mod_base = OTHER; note = 2'-O-methoxyethyl thymidine
  modified_base 19: mod_base = OTHER; note = 2'-O-methoxyethyl guanosine
  modified_base 20: mod_base = OTHER; note = 2'-O-methoxyethyl 5-methylcytidine
  misc_feature 1..5: note = RNA
  misc_feature 6..15: note = DNA
  misc_feature 16..20: note = RNA
gcagaggtgaagcgaagtgc

SEQ ID NO: 256 - DNA, 20 bp, synthetic construct
  source 1..20: mol_type = other DNA
  modified_base 1: mod_base = OTHER; note = 2'-O-methoxyethyl guanosine
  modified_base 2: mod_base = OTHER; note = Locked nucleic acid with cytosine base
  modified_base 3: mod_base = OTHER; note = 2'-O-methoxyethyl adenosine
  modified_base 4: mod_base = OTHER; note = Locked nucleic acid with guanine base
  modified_base 5: mod_base = OTHER; note = 2'-O-methoxyethyl adenosine
  modified_base 13: mod_base = OTHER; note = 2'-deoxy 5-methylcytidine
  modified_base 16: mod_base = OTHER; note = 2'-O-methoxyethyl adenosine
  modified_base 17: mod_base = OTHER; note = 2'-O-methoxyethyl guanosine
  modified_base 18: mod_base = OTHER; note = 2'-O-methoxyethyl thymidine
  modified_base 19: mod_base = OTHER; note = 2'-O-methoxyethyl guanosine
  modified_base 20: mod_base = OTHER; note = 2'-O-methoxyethyl 5-methylcytidine
  misc_feature 1..5: note = RNA
  misc_feature 6..15: note = DNA
  misc_feature 16..20: note = RNA
gcagaggtgaagcgaagtgc

SEQ ID NO: 257 - DNA, 20 bp, synthetic construct
  source 1..20: mol_type = other DNA
  modified_base 1: mod_base = OTHER; note = 2'-O-methoxyethyl guanosine
  modified_base 2: mod_base = OTHER; note = Locked nucleic acid with cytosine base
  modified_base 3: mod_base = OTHER; note = 2'-O-methoxyethyl adenosine
  modified_base 4: mod_base = OTHER; note = 2'-O-methoxyethyl guanosine
  modified_base 5: mod_base = OTHER; note = Locked nucleic acid with adenine base
  modified_base 13: mod_base = OTHER; note = 2'-deoxy 5-methylcytidine
  modified_base 16: mod_base = OTHER; note = 2'-O-methoxyethyl adenosine
  modified_base 17: mod_base = OTHER; note = 2'-O-methoxyethyl guanosine
  modified_base 18: mod_base = OTHER; note = 2'-O-methoxyethyl thymidine
  modified_base 19: mod_base = OTHER; note = 2'-O-methoxyethyl guanosine
  modified_base 20: mod_base = OTHER; note = 2'-O-methoxyethyl 5-methylcytidine
  misc_feature 1..5: note = RNA
  misc_feature 6..15: note = DNA
  misc_feature 16..20: note = RNA
gcagaggtgaagcgaagtgc

SEQ ID NO: 258 - DNA, 20 bp, synthetic construct
  source 1..20: mol_type = other DNA
  modified_base 1: mod_base = OTHER; note = 2'-O-methoxyethyl guanosine
  modified_base 2: mod_base = OTHER; note = 2'-O-methoxyethyl 5-methylcytidine
  modified_base 3: mod_base = OTHER; note = Locked nucleic acid with adenine base
  modified_base 4: mod_base = OTHER; note = Locked nucleic acid with guanine base
  modified_base 5: mod_base = OTHER; note = 2'-O-methoxyethyl adenosine
  modified_base 13: mod_base = OTHER; note = 2'-deoxy 5-methylcytidine
  modified_base 16: mod_base = OTHER; note = 2'-O-methoxyethyl adenosine
  modified_base 17: mod_base = OTHER; note = 2'-O-methoxyethyl guanosine
  modified_base 18: mod_base = OTHER; note = 2'-O-methoxyethyl thymidine
  modified_base 19: mod_base = OTHER; note = 2'-O-methoxyethyl guanosine
  modified_base 20: mod_base = OTHER; note = 2'-O-methoxyethyl 5-methylcytidine
  misc_feature 1..5: note = RNA
  misc_feature 6..15: note = DNA
  misc_feature 16..20: note = RNA
gcagaggtgaagcgaagtgc

SEQ ID NO: 259 - DNA, 20 bp, synthetic construct
  source 1..20: mol_type = other DNA
  modified_base 1: mod_base = OTHER; note = 2'-O-methoxyethyl guanosine
  modified_base 2: mod_base = OTHER; note = 2'-O-methoxyethyl 5-methylcytidine
  modified_base 3: mod_base = OTHER; note = Locked nucleic acid with adenine base
  modified_base 4: mod_base = OTHER; note = 2'-O-methoxyethyl guanosine
  modified_base 5: mod_base = OTHER; note = Locked nucleic acid with adenine base
  modified_base 13: mod_base = OTHER; note = 2'-deoxy 5-methylcytidine
  modified_base 16: mod_base = OTHER; note = 2'-O-methoxyethyl adenosine
  modified_base 17: mod_base = OTHER; note = 2'-O-methoxyethyl guanosine
  modified_base 18: mod_base = OTHER; note = 2'-O-methoxyethyl thymidine
  modified_base 19: mod_base = OTHER; note = 2'-O-methoxyethyl guanosine
  modified_base 20: mod_base = OTHER; note = 2'-O-methoxyethyl 5-methylcytidine
  misc_feature 1..5: note = RNA
  misc_feature 6..15: note = DNA
  misc_feature 16..20: note = RNA
gcagaggtgaagcgaagtgc

SEQ ID NO: 260 - DNA, 20 bp, synthetic construct
  source 1..20: mol_type = other DNA
  modified_base 1: mod_base = OTHER; note = 2'-O-methoxyethyl guanosine
  modified_base 2: mod_base = OTHER; note = 2'-O-methoxyethyl 5-methylcytidine
  modified_base 3: mod_base = OTHER; note = 2'-O-methoxyethyl adenosine
  modified_base 4: mod_base = OTHER; note = Locked nucleic acid with guanine base
  modified_base 5: mod_base = OTHER; note = Locked nucleic acid with adenine base
  modified_base 13: mod_base = OTHER; note = 2'-deoxy 5-methylcytidine
  modified_base 16: mod_base = OTHER; note = 2'-O-methoxyethyl adenosine
  modified_base 17: mod_base = OTHER; note = 2'-O-methoxyethyl guanosine
  modified_base 18: mod_base = OTHER; note = 2'-O-methoxyethyl thymidine
  modified_base 19: mod_base = OTHER; note = 2'-O-methoxyethyl guanosine
  modified_base 20: mod_base = OTHER; note = 2'-O-methoxyethyl 5-methylcytidine
  misc_feature 1..5: note = RNA
  misc_feature 6..15: note = DNA
  misc_feature 16..20: note = RNA
gcagaggtgaagcgaagtgc

SEQ ID NO: 261 - DNA, 20 bp, synthetic construct
  source 1..20: mol_type = other DNA
  modified_base 1: mod_base = OTHER; note = Locked nucleic acid with guanine base
  modified_base 2: mod_base = OTHER; note = Locked nucleic acid with cytosine base
  modified_base 3: mod_base = OTHER; note = Locked nucleic acid with adenine base
  modified_base 4: mod_base = OTHER; note = 2'-O-methoxyethyl guanosine
  modified_base 5: mod_base = OTHER; note = 2'-O-methoxyethyl adenosine
  modified_base 13: mod_base = OTHER; note = 2'-deoxy 5-methylcytidine
  modified_base 16: mod_base = OTHER; note = 2'-O-methoxyethyl adenosine
  modified_base 17: mod_base = OTHER; note = 2'-O-methoxyethyl guanosine
  modified_base 18: mod_base = OTHER; note = 2'-O-methoxyethyl thymidine
  modified_base 19: mod_base = OTHER; note = 2'-O-methoxyethyl guanosine
  modified_base 20: mod_base = OTHER; note = 2'-O-methoxyethyl 5-methylcytidine
  misc_feature 1..5: note = RNA
  misc_feature 6..15: note = DNA
  misc_feature 16..20: note = RNA
gcagaggtgaagcgaagtgc

SEQ ID NO: 262 - DNA, 20 bp, synthetic construct
  source 1..20: mol_type = other DNA
  modified_base 1: mod_base = OTHER; note = Locked nucleic acid with guanine base
  modified_base 2: mod_base = OTHER; note = Locked nucleic acid with cytosine base
  modified_base 3: mod_base = OTHER; note = 2'-O-methoxyethyl adenosine
  modified_base 4: mod_base = OTHER; note = Locked nucleic acid with guanine base
  modified_base 5: mod_base = OTHER; note = 2'-O-methoxyethyl adenosine
  modified_base 13: mod_base = OTHER; note = 2'-deoxy 5-methylcytidine
  modified_base 16: mod_base = OTHER; note = 2'-O-methoxyethyl adenosine
  modified_base 17: mod_base = OTHER; note = 2'-O-methoxyethyl guanosine
  modified_base 18: mod_base = OTHER; note = 2'-O-methoxyethyl thymidine
  modified_base 19: mod_base = OTHER; note = 2'-O-methoxyethyl guanosine
  modified_base 20: mod_base = OTHER; note = 2'-O-methoxyethyl 5-methylcytidine
  misc_feature 1..5: note = RNA
  misc_feature 6..15: note = DNA
  misc_feature 16..20: note = RNA
gcagaggtgaagcgaagtgc

SEQ ID NO: 263 - DNA, 20 bp, synthetic construct
  source 1..20: mol_type = other DNA
  modified_base 1: mod_base = OTHER; note = Locked nucleic acid with guanine base
  modified_base 2: mod_base = OTHER; note = Locked nucleic acid with cytosine base
  modified_base 3: mod_base = OTHER; note = 2'-O-methoxyethyl adenosine
  modified_base 4: mod_base = OTHER; note = 2'-O-methoxyethyl guanosine
  modified_base 5: mod_base = OTHER; note = Locked nucleic acid with adenine base
  modified_base 13: mod_base = OTHER; note = 2'-deoxy 5-methylcytidine
  modified_base 16: mod_base = OTHER; note = 2'-O-methoxyethyl adenosine
  modified_base 17: mod_base = OTHER; note = 2'-O-methoxyethyl guanosine
  modified_base 18: mod_base = OTHER; note = 2'-O-methoxyethyl thymidine
  modified_base 19: mod_base = OTHER; note = 2'-O-methoxyethyl guanosine
  modified_base 20: mod_base = OTHER; note = 2'-O-methoxyethyl 5-methylcytidine
  misc_feature 1..5: note = RNA
  misc_feature 6..15: note = DNA
  misc_feature 16..20: note = RNA
gcagaggtgaagcgaagtgc

SEQ ID NO: 264 - DNA, 20 bp, synthetic construct
  source 1..20: mol_type = other DNA
  modified_base 1: mod_base = OTHER; note = Locked nucleic acid with guanine base
  modified_base 2: mod_base = OTHER; note = 2'-O-methoxyethyl 5-methylcytidine
  modified_base 3: mod_base = OTHER; note = Locked nucleic acid with adenine base
  modified_base 4: mod_base = OTHER; note = Locked nucleic acid with guanine base
  modified_base 5: mod_base = OTHER; note = 2'-O-methoxyethyl adenosine
  modified_base 13: mod_base = OTHER; note = 2'-deoxy 5-methylcytidine
  modified_base 16: mod_base = OTHER; note = 2'-O-methoxyethyl adenosine
  modified_base 17: mod_base = OTHER; note = 2'-O-methoxyethyl guanosine
  modified_base 18: mod_base = OTHER; note = 2'-O-methoxyethyl thymidine
  modified_base 19: mod_base = OTHER; note = 2'-O-methoxyethyl guanosine
  modified_base 20: mod_base = OTHER; note = 2'-O-methoxyethyl 5-methylcytidine
  misc_feature 1..5: note = RNA
  misc_feature 6..15: note = DNA
  misc_feature 16..20: note = RNA
gcagaggtgaagcgaagtgc

SEQ ID NO: 265 - DNA, 20 bp, synthetic construct
  source 1..20: mol_type = other DNA
  modified_base 1: mod_base = OTHER; note = Locked nucleic acid with guanine base
  modified_base 2: mod_base = OTHER; note = 2'-O-methoxyethyl 5-methylcytidine
  modified_base 3: mod_base = OTHER; note = Locked nucleic acid with adenine base
  modified_base 4: mod_base = OTHER; note = 2'-O-methoxyethyl guanosine
  modified_base 5: mod_base = OTHER; note = Locked nucleic acid with adenine base
  modified_base 13: mod_base = OTHER; note = 2'-deoxy 5-methylcytidine
  modified_base 16: mod_base = OTHER; note = 2'-O-methoxyethyl adenosine
  modified_base 17: mod_base = OTHER; note = 2'-O-methoxyethyl guanosine
  modified_base 18: mod_base = OTHER; note = 2'-O-methoxyethyl thymidine
  modified_base 19: mod_base = OTHER; note = 2'-O-methoxyethyl guanosine
  modified_base 20: mod_base = OTHER; note = 2'-O-methoxyethyl 5-methylcytidine
  misc_feature 1..5: note = RNA
  misc_feature 6..15: note = DNA
  misc_feature 16..20: note = RNA
gcagaggtgaagcgaagtgc

SEQ ID NO: 266 - DNA, 20 bp, synthetic construct
  source 1..20: mol_type = other DNA
  modified_base 1: mod_base = OTHER; note = Locked nucleic acid with guanine base
  modified_base 2: mod_base = OTHER; note = 2'-O-methoxyethyl 5-methylcytidine
  modified_base 3: mod_base = OTHER; note = 2'-O-methoxyethyl adenosine
  modified_base 4: mod_base = OTHER; note = Locked nucleic acid with guanine base
  modified_base 5: mod_base = OTHER; note = Locked nucleic acid with adenine base
  modified_base 13: mod_base = OTHER; note = 2'-deoxy 5-methylcytidine
  modified_base 16: mod_base = OTHER; note = 2'-O-methoxyethyl adenosine
  modified_base 17: mod_base = OTHER; note = 2'-O-methoxyethyl guanosine
  modified_base 18: mod_base = OTHER; note = 2'-O-methoxyethyl thymidine
  modified_base 19: mod_base = OTHER; note = 2'-O-methoxyethyl guanosine
  modified_base 20: mod_base = OTHER; note = 2'-O-methoxyethyl 5-methylcytidine
  misc_feature 1..5: note = RNA
  misc_feature 6..15: note = DNA
  misc_feature 16..20: note = RNA
gcagaggtgaagcgaagtgc

SEQ ID NO: 267 - DNA, 20 bp, synthetic construct
  source 1..20: mol_type = other DNA
  modified_base 1: mod_base = OTHER; note = 2'-O-methoxyethyl guanosine
  modified_base 2: mod_base = OTHER; note = Locked nucleic acid with cytosine base
  modified_base 3: mod_base = OTHER; note = Locked nucleic acid with adenine base
  modified_base 4: mod_base = OTHER; note = Locked nucleic acid with guanine base
  modified_base 5: mod_base = OTHER; note = 2'-O-methoxyethyl adenosine
  modified_base 13: mod_base = OTHER; note = 2'-deoxy 5-methylcytidine
  modified_base 16: mod_base = OTHER; note = 2'-O-methoxyethyl adenosine
  modified_base 17: mod_base = OTHER; note = 2'-O-methoxyethyl guanosine
  modified_base 18: mod_base = OTHER; note = 2'-O-methoxyethyl thymidine
  modified_base 19: mod_base = OTHER; note = 2'-O-methoxyethyl guanosine
  modified_base 20: mod_base = OTHER; note = 2'-O-methoxyethyl 5-methylcytidine
  misc_feature 1..5: note = RNA
  misc_feature 6..15: note = DNA
  misc_feature 16..20: note = RNA
gcagaggtgaagcgaagtgc

SEQ ID NO: 268 - DNA, 20 bp, synthetic construct
  source 1..20: mol_type = other DNA
  modified_base 1: mod_base = OTHER; note = 2'-O-methoxyethyl guanosine
  modified_base 2: mod_base = OTHER; note = Locked nucleic acid with cytosine base
  modified_base 3: mod_base = OTHER; note = Locked nucleic acid with adenine base
  modified_base 4: mod_base = OTHER; note = 2'-O-methoxyethyl guanosine
  modified_base 5: mod_base = OTHER; note = Locked nucleic acid with adenine base
  modified_base 13: mod_base = OTHER; note = 2'-deoxy 5-methylcytidine
  modified_base 16: mod_base = OTHER; note = 2'-O-methoxyethyl adenosine
  modified_base 17: mod_base = OTHER; note = 2'-O-methoxyethyl guanosine
  modified_base 18: mod_base = OTHER; note = 2'-O-methoxyethyl thymidine
  modified_base 19: mod_base = OTHER; note = 2'-O-methoxyethyl guanosine
  modified_base 20: mod_base = OTHER; note = 2'-O-methoxyethyl 5-methylcytidine
  misc_feature 1..5: note = RNA
  misc_feature 6..15: note = DNA
  misc_feature 16..20: note = RNA
gcagaggtgaagcgaagtgc

SEQ ID NO: 269 - DNA, 20 bp, synthetic construct
  source 1..20: mol_type = other DNA
  modified_base 1: mod_base = OTHER; note = 2'-O-methoxyethyl guanosine
  modified_base 2: mod_base = OTHER; note = Locked nucleic acid with cytosine base
  modified_base 3: mod_base = OTHER; note = 2'-O-methoxyethyl adenosine
  modified_base 4: mod_base = OTHER; note = Locked nucleic acid with guanine base
  modified_base 5: mod_base = OTHER; note = Locked nucleic acid with adenine base
  modified_base 13: mod_base = OTHER; note = 2'-deoxy 5-methylcytidine
  modified_base 16: mod_base = OTHER; note = 2'-O-methoxyethyl adenosine
  modified_base 17: mod_base = OTHER; note = 2'-O-methoxyethyl guanosine
  modified_base 18: mod_base = OTHER; note = 2'-O-methoxyethyl thymidine
  modified_base 19: mod_base = OTHER; note = 2'-O-methoxyethyl guanosine
  modified_base 20: mod_base = OTHER; note = 2'-O-methoxyethyl 5-methylcytidine
  misc_feature 1..5: note = RNA
  misc_feature 6..15: note = DNA
  misc_feature 16..20: note = RNA
gcagaggtgaagcgaagtgc

SEQ ID NO: 270 - DNA, 20 bp, synthetic construct
  source 1..20: mol_type = other DNA
  modified_base 1: mod_base = OTHER; note = 2'-O-methoxyethyl guanosine
  modified_base 2: mod_base = OTHER; note = 2'-O-methoxyethyl 5-methylcytidine
  modified_base 3: mod_base = OTHER; note = Locked nucleic acid with adenine base
  modified_base 4: mod_base = OTHER; note = Locked nucleic acid with guanine base
  modified_base 5: mod_base = OTHER; note = Locked nucleic acid with adenine base
  modified_base 13: mod_base = OTHER; note = 2'-deoxy 5-methylcytidine
  modified_base 16: mod_base = OTHER; note = 2'-O-methoxyethyl adenosine
  modified_base 17: mod_base = OTHER; note = 2'-O-methoxyethyl guanosine
  modified_base 18: mod_base = OTHER; note = 2'-O-methoxyethyl thymidine
  modified_base 19: mod_base = OTHER; note = 2'-O-methoxyethyl guanosine
  modified_base 20: mod_base = OTHER; note = 2'-O-methoxyethyl 5-methylcytidine
  misc_feature 1..5: note = RNA
  misc_feature 6..15: note = DNA
  misc_feature 16..20: note = RNA
gcagaggtgaagcgaagtgc

SEQ ID NO: 271 - DNA, 20 bp, synthetic construct
  source 1..20: mol_type = other DNA
  modified_base 1: mod_base = OTHER; note = 2'-O-methoxyethyl guanosine
  modified_base 2: mod_base = OTHER; note = 2'-deoxy 5-methylcytidine
  modified_base 3: mod_base = OTHER; note = 2'-O-methoxyethyl adenosine
  modified_base 4: mod_base = OTHER; note = 2'-O-methoxyethyl guanosine
  modified_base 5: mod_base = OTHER; note = 2'-O-methoxyethyl adenosine
  modified_base 6: mod_base = OTHER; note = 2'-O-methyl guanosine
  modified_base 11: mod_base = OTHER; note = 2'-O-methyl adenosine
  modified_base 13: mod_base = OTHER; note = 2'-deoxy 5-methylcytidine
  modified_base 16: mod_base = OTHER; note = 2'-O-methoxyethyl adenosine
  modified_base 17: mod_base = OTHER; note = 2'-O-methoxyethyl guanosine
  modified_base 18: mod_base = OTHER; note = 2'-O-methoxyethyl thymidine
  modified_base 19: mod_base = OTHER; note = 2'-O-methoxyethyl guanosine
  modified_base 20: mod_base = OTHER; note = 2'-O-methoxyethyl 5-methylcytidine
  misc_feature 1: note = RNA
  misc_feature 2: note = DNA
  misc_feature 3..6: note = RNA
  misc_feature 7..10: note = DNA
  misc_feature 11: note = RNA
  misc_feature 12..15: note = DNA
  misc_feature 16..20: note = RNA
gcagaggtgaagcgaagtgc

SEQ ID NO: 272 - DNA, 20 bp, synthetic construct
  source 1..20: mol_type = other DNA
  modified_base 1: mod_base = OTHER; note = 2'-O-methoxyethyl guanosine
  modified_base 2: mod_base = OTHER; note = 2'-deoxy 5-methylcytidine
  modified_base 3: mod_base = OTHER; note = 2'-O-methoxyethyl adenosine
  modified_base 5: mod_base = OTHER; note = 2'-O-methoxyethyl adenosine
  modified_base 6: mod_base = OTHER; note = 2'-O-methyl guanosine
  modified_base 11: mod_base = OTHER; note = 2'-O-methyl adenosine
  modified_base 13: mod_base = OTHER; note = 2'-deoxy 5-methylcytidine
  modified_base 16: mod_base = OTHER; note = 2'-O-methoxyethyl adenosine
  modified_base 17: mod_base = OTHER; note = 2'-O-methoxyethyl guanosine
  modified_base 18: mod_base = OTHER; note = 2'-O-methoxyethyl thymidine
  modified_base 19: mod_base = OTHER; note = 2'-O-methoxyethyl guanosine
  modified_base 20: mod_base = OTHER; note = 2'-O-methoxyethyl 5-methylcytidine
  misc_feature 1: note = RNA
  misc_feature 2: note = DNA
  misc_feature 3: note = RNA
  misc_feature 4: note = DNA
  misc_feature 5..6: note = RNA
  misc_feature 7..10: note = DNA
  misc_feature 11: note = RNA
  misc_feature 12..15: note = DNA
  misc_feature 16..20: note = RNA
gcagaggtgaagcgaagtgc

SEQ ID NO: 273 - DNA, 20 bp, synthetic construct
  source 1..20: mol_type = other DNA
  modified_base 1: mod_base = OTHER; note = 2'-O-methoxyethyl guanosine
  modified_base 2: mod_base = OTHER; note = 2'-deoxy cytidine
  modified_base 3: mod_base = OTHER; note = 2'-O-methoxyethyl adenosine
  modified_base 4: mod_base = OTHER; note = 2'-O-methoxyethyl guanosine
  modified_base 5: mod_base = OTHER; note = 2'-O-methoxyethyl adenosine
  modified_base 6: mod_base = OTHER; note = 2'-O-methyl guanosine
  modified_base 11: mod_base = OTHER; note = 2'-O-methyl adenosine
  modified_base 13: mod_base = OTHER; note = 2'-deoxy 5-methylcytidine
  modified_base 16: mod_base = OTHER; note = 2'-O-methoxyethyl adenosine
  modified_base 17: mod_base = OTHER; note = 2'-O-methoxyethyl guanosine
  modified_base 18: mod_base = OTHER; note = 2'-O-methoxyethyl thymidine
  modified_base 19: mod_base = OTHER; note = 2'-O-methoxyethyl guanosine
  modified_base 20: mod_base = OTHER; note = 2'-O-methoxyethyl 5-methylcytidine
  misc_feature 1: note = RNA
  misc_feature 2: note = DNA
  misc_feature 3..6: note = RNA
  misc_feature 7..10: note = DNA
  misc_feature 11: note = RNA
  misc_feature 12..15: note = DNA
  misc_feature 16..20: note = RNA
gcagaggtgaagcgaagtgc

SEQ ID NO: 274 - DNA, 20 bp, synthetic construct
  source 1..20: mol_type = other DNA
  modified_base 1: mod_base = OTHER; note = 2'-O-methoxyethyl guanosine
  modified_base 2: mod_base = OTHER; note = 2'-deoxy cytidine
  modified_base 3: mod_base = OTHER; note = 2'-O-methoxyethyl adenosine
  modified_base 4: mod_base = OTHER; note = 2'-OH guanosine
  modified_base 5: mod_base = OTHER; note = 2'-O-methoxyethyl adenosine
  modified_base 6: mod_base = OTHER; note = 2'-O-methyl guanosine
  modified_base 11: mod_base = OTHER; note = 2'-O-methyl adenosine
  modified_base 13: mod_base = OTHER; note = 2'-deoxy 5-methylcytidine
  modified_base 16: mod_base = OTHER; note = 2'-O-methoxyethyl adenosine
  modified_base 17: mod_base = OTHER; note = 2'-O-methoxyethyl guanosine
  modified_base 18: mod_base = OTHER; note = 2'-O-methoxyethyl thymidine
  modified_base 19: mod_base = OTHER; note = 2'-O-methoxyethyl guanosine
  modified_base 20: mod_base = OTHER; note = 2'-O-methoxyethyl 5-methylcytidine
  misc_feature 1: note = RNA
  misc_feature 2: note = DNA
  misc_feature 3: note = RNA
  misc_feature 4: note = DNA
  misc_feature 5..6: note = RNA
  misc_feature 7..10: note = DNA
  misc_feature 11: note = RNA
  misc_feature 12..15: note = DNA
  misc_feature 16..20: note = RNA
gcagaggtgaagcgaagtgc

SEQ ID NO: 275 - DNA, 20 bp, synthetic construct
  source 1..20: mol_type = other DNA
  modified_base 1: mod_base = OTHER; note = Locked nucleic acid with guanine base
  modified_base 2: mod_base = OTHER; note = 2'-O-methoxyethyl 5-methylcytidine
  modified_base 3: mod_base = OTHER; note = 2'-O-methoxyethyl adenosine
  modified_base 4: mod_base = OTHER; note = 2'-O-methoxyethyl guanosine
  modified_base 5: mod_base = OTHER; note = 2'-O-methoxyethyl adenosine
  modified_base 6: mod_base = OTHER; note = 2'-O-methyl guanosine
  modified_base 11: mod_base = OTHER; note = 2'-O-methyl adenosine
  modified_base 13: mod_base = OTHER; note = 2'-deoxy 5-methylcytidine
  modified_base 16: mod_base = OTHER; note = 2'-O-methoxyethyl adenosine
  modified_base 17: mod_base = OTHER; note = 2'-O-methoxyethyl guanosine
  modified_base 18: mod_base = OTHER; note = 2'-O-methoxyethyl thymidine
  modified_base 19: mod_base = OTHER; note = 2'-O-methoxyethyl guanosine
  modified_base 20: mod_base = OTHER; note = 2'-O-methoxyethyl 5-methylcytidine
  misc_feature 1..6: note = RNA
  misc_feature 7..10: note = DNA
  misc_feature 11: note = RNA
  misc_feature 12..15: note = DNA
  misc_feature 16..20: note = RNA
gcagaggtgaagcgaagtgc

SEQ ID NO: 276 - DNA, 20 bp, synthetic construct
  source 1..20: mol_type = other DNA
  modified_base 1: mod_base = OTHER; note = 2'-O-methoxyethyl guanosine
  modified_base 2: mod_base = OTHER; note = Locked nucleic acid with cytosine base
  modified_base 3: mod_base = OTHER; note = 2'-O-methoxyethyl adenosine
  modified_base 4: mod_base = OTHER; note = 2'-O-methyl guanosine
  modified_base 5: mod_base = OTHER; note = 2'-O-methoxyethyl adenosine
  modified_base 6: mod_base = OTHER; note = 2'-O-methyl guanosine
  modified_base 11: mod_base = OTHER; note = 2'-O-methyl adenosine
  modified_base 13: mod_base = OTHER; note = 2'-deoxy 5-methylcytidine
  modified_base 16: mod_base = OTHER; note = 2'-O-methoxyethyl adenosine
  modified_base 17: mod_base = OTHER; note = 2'-O-methoxyethyl guanosine
  modified_base 18: mod_base = OTHER; note = 2'-O-methoxyethyl thymidine
  modified_base 19: mod_base = OTHER; note = 2'-O-methoxyethyl guanosine
  modified_base 20: mod_base = OTHER; note = 2'-O-methoxyethyl 5-methylcytidine
  misc_feature 1..6: note = RNA
  misc_feature 7..10: note = DNA
  misc_feature 11: note = RNA
  misc_feature 12..15: note = DNA
  misc_feature 16..20: note = RNA
gcagaggtgaagcgaagtgc

SEQ ID NO: 277 - DNA, 20 bp, synthetic construct
  source 1..20: mol_type = other DNA
  modified_base 1: mod_base = OTHER; note = 2'-O-methoxyethyl guanosine
  modified_base 2: mod_base = OTHER; note = 2'-O-methoxyethyl 5-methylcytidine
  modified_base 3: mod_base = OTHER; note = Locked nucleic acid with adenine base
  modified_base 4: mod_base = OTHER; note = 2'-O-methoxyethyl guanosine
  modified_base 5: mod_base = OTHER; note = 2'-O-methoxyethyl adenosine
  modified_base 6: mod_base = OTHER; note = 2'-O-methyl guanosine
  modified_base 11: mod_base = OTHER; note = 2'-O-methyl adenosine
  modified_base 13: mod_base = OTHER; note = 2'-deoxy 5-methylcytidine
  modified_base 16: mod_base = OTHER; note = 2'-O-methoxyethyl adenosine
  modified_base 17: mod_base = OTHER; note = 2'-O-methoxyethyl guanosine
  modified_base 18: mod_base = OTHER; note = 2'-O-methoxyethyl thymidine
  modified_base 19: mod_base = OTHER; note = 2'-O-methoxyethyl guanosine
  modified_base 20: mod_base = OTHER; note = 2'-O-methoxyethyl 5-methylcytidine
  misc_feature 1..6: note = RNA
  misc_feature 7..10: note = DNA
  misc_feature 11: note = RNA
  misc_feature 12..15: note = DNA
  misc_feature 16..20: note = RNA
gcagaggtgaagcgaagtgc

SEQ ID NO: 278 - DNA, 20 bp, synthetic construct
  source 1..20: mol_type = other DNA
  modified_base 1: mod_base = OTHER; note = 2'-O-methoxyethyl guanosine
  modified_base 2: mod_base = OTHER; note = 2'-O-methoxyethyl 5-methylcytidine
  modified_base 3: mod_base = OTHER; note = 2'-O-methoxyethyl adenosine
  modified_base 4: mod_base = OTHER; note = Locked nucleic acid with guanine base
  modified_base 5: mod_base = OTHER; note = 2'-O-methoxyethyl adenosine
  modified_base 6: mod_base = OTHER; note = 2'-O-methyl guanosine
  modified_base 11: mod_base = OTHER; note = 2'-O-methyl adenosine
  modified_base 13: mod_base = OTHER; note = 2'-deoxy 5-methylcytidine
  modified_base 16: mod_base = OTHER; note = 2'-O-methoxyethyl adenosine
  modified_base 17: mod_base = OTHER; note = 2'-O-methoxyethyl guanosine
  modified_base 18: mod_base = OTHER; note = 2'-O-methoxyethyl thymidine
  modified_base 19: mod_base = OTHER; note = 2'-O-methoxyethyl guanosine
  modified_base 20: mod_base = OTHER; note = 2'-O-methoxyethyl 5-methylcytidine
  misc_feature 1..6: note = RNA
  misc_feature 7..10: note = DNA
  misc_feature 11: note = RNA
  misc_feature 12..15: note = DNA
  misc_feature 16..20: note = RNA
gcagaggtgaagcgaagtgc

SEQ ID NO: 279 - DNA, 20 bp, synthetic construct
  source 1..20: mol_type = other DNA
  modified_base 1: mod_base = OTHER; note = 2'-O-methoxyethyl guanosine
  modified_base 2: mod_base = OTHER; note = 2'-O-methoxyethyl 5-methylcytidine
  modified_base 3: mod_base = OTHER; note = 2'-O-methoxyethyl adenosine
  modified_base 4: mod_base = OTHER; note = 2'-O-methoxyethyl guanosine
  modified_base 5: mod_base = OTHER; note = Locked nucleic acid with adenine base
  modified_base 6: mod_base = OTHER; note = 2'-O-methyl guanosine
  modified_base 11: mod_base = OTHER; note = 2'-O-methyl adenosine
  modified_base 13: mod_base = OTHER; note = 2'-deoxy 5-methylcytidine
  modified_base 16: mod_base = OTHER; note = 2'-O-methoxyethyl adenosine
  modified_base 17: mod_base = OTHER; note = 2'-O-methoxyethyl guanosine
  modified_base 18: mod_base = OTHER; note = 2'-O-methoxyethyl thymidine
  modified_base 19: mod_base = OTHER; note = 2'-O-methoxyethyl guanosine
  modified_base 20: mod_base = OTHER; note = 2'-O-methoxyethyl 5-methylcytidine
  misc_feature 1..6: note = RNA
  misc_feature 7..10: note = DNA
  misc_feature 11: note = RNA
  misc_feature 12..15: note = DNA
  misc_feature 16..20: note = RNA
gcagaggtgaagcgaagtgc

SEQ ID NO: 280 - DNA, 20 bp, synthetic construct
  source 1..20: mol_type = other DNA
  modified_base 1: mod_base = OTHER; note = Locked nucleic acid with guanine base
  modified_base 2: mod_base = OTHER; note = 2'-deoxy 5-methylcytidine
  modified_base 3: mod_base = OTHER; note = 2'-O-methoxyethyl adenosine
  modified_base 4: mod_base = OTHER; note = 2'-O-methoxyethyl guanosine
  modified_base 5: mod_base = OTHER; note = 2'-O-methoxyethyl adenosine
  modified_base 6: mod_base = OTHER; note = 2'-O-methyl guanosine
  modified_base 11: mod_base = OTHER; note = 2'-O-methyl adenosine
  modified_base 13: mod_base = OTHER; note = 2'-deoxy 5-methylcytidine
  modified_base 16: mod_base = OTHER; note = 2'-O-methoxyethyl adenosine
  modified_base 17: mod_base = OTHER; note = 2'-O-methoxyethyl guanosine
  modified_base 18: mod_base = OTHER; note = 2'-O-methoxyethyl thymidine
  modified_base 19: mod_base = OTHER; note = 2'-O-methoxyethyl guanosine
  modified_base 20: mod_base = OTHER; note = 2'-O-methoxyethyl 5-methylcytidine
  misc_feature 1: note = RNA
  misc_feature 2: note = DNA
  misc_feature 3..6: note = RNA
  misc_feature 7..10: note = DNA
  misc_feature 11: note = RNA
  misc_feature 12..15: note = DNA
  misc_feature 16..20: note = RNA
gcagaggtgaagcgaagtgc

SEQ ID NO: 281 - DNA, 20 bp, synthetic construct
  source 1..20: mol_type = other DNA
  modified_base 1: mod_base = OTHER; note = 2'-O-methoxyethyl guanosine
  modified_base 2: mod_base = OTHER; note = 2'-deoxy 5-methylcytidine
  modified_base 3: mod_base = OTHER; note = Locked nucleic acid with adenine base
  modified_base 4: mod_base = OTHER; note = 2'-O-methoxyethyl guanosine
  modified_base 5: mod_base = OTHER; note = 2'-O-methoxyethyl adenosine
  modified_base 6: mod_base = OTHER; note = 2'-O-methyl guanosine
  modified_base 11: mod_base = OTHER; note = 2'-O-methyl adenosine
  modified_base 13: mod_base = OTHER; note = 2'-deoxy 5-methylcytidine
  modified_base 16: mod_base = OTHER; note = 2'-O-methoxyethyl adenosine
  modified_base 17: mod_base = OTHER; note = 2'-O-methoxyethyl guanosine
  modified_base 18: mod_base = OTHER; note = 2'-O-methoxyethyl thymidine
  modified_base 19: mod_base = OTHER; note = 2'-O-methoxyethyl guanosine
  modified_base 20: mod_base = OTHER; note = 2'-O-methoxyethyl 5-methylcytidine
  misc_feature 1: note = RNA
  misc_feature 2: note = DNA
  misc_feature 3..6: note = RNA
  misc_feature 7..10: note = DNA
  misc_feature 11: note = RNA
  misc_feature 12..15: note = DNA
  misc_feature 16..20: note = RNA
gcagaggtgaagcgaagtgc

SEQ ID NO: 282 - DNA, 20 bp, synthetic construct
  source 1..20: mol_type = other DNA
  modified_base 1: mod_base = OTHER; note = 2'-O-methoxyethyl guanosine
  modified_base 2: mod_base = OTHER; note = 2'-deoxy 5-methylcytidine
  modified_base 3: mod_base = OTHER; note = 2'-O-methoxyethyl adenosine
  modified_base 4: mod_base = OTHER; note = Locked nucleic acid with guanine base
  modified_base 5: mod_base = OTHER; note = 2'-O-methoxyethyl adenosine
  modified_base 6: mod_base = OTHER; note = 2'-O-methyl guanosine
  modified_base 11: mod_base = OTHER; note = 2'-O-methyl adenosine
  modified_base 13: mod_base = OTHER; note = 2'-deoxy 5-methylcytidine
  modified_base 16: mod_base = OTHER; note = 2'-O-methoxyethyl adenosine
  modified_base 17: mod_base = OTHER; note = 2'-O-methoxyethyl guanosine
  modified_base 18: mod_base = OTHER; note = 2'-O-methoxyethyl thymidine
  modified_base 19: mod_base = OTHER; note = 2'-O-methoxyethyl guanosine
  modified_base 20: mod_base = OTHER; note = 2'-O-methoxyethyl 5-methylcytidine
  misc_feature 1: note = RNA
  misc_feature 2: note = DNA
  misc_feature 3..6: note = RNA
  misc_feature 7..10: note = DNA
  misc_feature 11: note = RNA
  misc_feature 12..15: note = DNA
  misc_feature 16..20: note = RNA
gcagaggtgaagcgaagtgc

SEQ ID NO: 283 - DNA, 20 bp, synthetic construct
  source 1..20: mol_type = other DNA
  modified_base 1: mod_base = OTHER; note = 2'-O-methoxyethyl guanosine
  modified_base 2: mod_base = OTHER; note = 2'-deoxy 5-methylcytidine
  modified_base 3: mod_base = OTHER; note = 2'-O-methoxyethyl adenosine
  modified_base 4: mod_base = OTHER; note = 2'-O-methoxyethyl guanosine
  modified_base 5: mod_base = OTHER; note = Locked nucleic acid with adenine base
  modified_base 6: mod_base = OTHER; note = 2'-O-methyl guanosine
  modified_base 11: mod_base = OTHER; note = 2'-O-methyl adenosine
  modified_base 13: mod_base = OTHER; note = 2'-deoxy 5-methylcytidine
  modified_base 16: mod_base = OTHER; note = 2'-O-methoxyethyl adenosine
  modified_base 17: mod_base = OTHER; note = 2'-O-methoxyethyl guanosine
  modified_base 18: mod_base = OTHER; note = 2'-O-methoxyethyl thymidine
  modified_base 19: mod_base = OTHER; note = 2'-O-methoxyethyl guanosine
  modified_base 20: mod_base = OTHER; note = 2'-O-methoxyethyl 5-methylcytidine
  misc_feature 1: note = RNA
  misc_feature 2: note = DNA
  misc_feature 3..6: note = RNA
  misc_feature 7..10: note = DNA
  misc_feature 11: note = RNA
  misc_feature 12..15: note = DNA
  misc_feature 16..20: note = RNA
gcagaggtgaagcgaagtgc

SEQ ID NO: 284 - DNA, 20 bp, synthetic construct
  source 1..20: mol_type = other DNA
  modified_base 1: mod_base = OTHER; note = Locked nucleic acid with guanine base
  modified_base 2: mod_base = OTHER; note = 2'-deoxy 5-methylcytidine
  modified_base 3: mod_base = OTHER; note = 2'-O-methoxyethyl adenosine
  modified_base 5: mod_base = OTHER; note = 2'-O-methoxyethyl adenosine
  modified_base 6: mod_base = OTHER; note = 2'-O-methyl guanosine
  modified_base 11: mod_base = OTHER; note = 2'-O-methyl adenosine
  modified_base 13: mod_base = OTHER; note = 2'-deoxy 5-methylcytidine
  modified_base 16: mod_base = OTHER; note = 2'-O-methoxyethyl adenosine
  modified_base 17: mod_base = OTHER; note = 2'-O-methoxyethyl guanosine
  modified_base 18: mod_base = OTHER; note = 2'-O-methoxyethyl thymidine
  modified_base 19: mod_base = OTHER; note = 2'-O-methoxyethyl guanosine
  modified_base 20: mod_base = OTHER; note = 2'-O-methoxyethyl 5-methylcytidine
  misc_feature 1: note = RNA
  misc_feature 2: note = DNA
  misc_feature 3: note = RNA
  misc_feature 4: note = DNA
  misc_feature 5..6: note = RNA
  misc_feature 7..10: note = DNA
  misc_feature 11: note = RNA
  misc_feature 12..15: note = DNA
  misc_feature 16..20: note = RNA
gcagaggtgaagcgaagtgc

SEQ ID NO: 285 - DNA, 20 bp, synthetic construct
  source 1..20: mol_type = other DNA
  modified_base 1: mod_base = OTHER; note = 2'-O-methoxyethyl guanosine
  modified_base 2: mod_base = OTHER; note = 2'-deoxy 5-methylcytidine
  modified_base 3: mod_base = OTHER; note = Locked nucleic acid with adenine base
  modified_base 5: mod_base = OTHER; note = 2'-O-methoxyethyl adenosine
  modified_base 6: mod_base = OTHER; note = 2'-O-methyl guanosine
  modified_base 11: mod_base = OTHER; note = 2'-O-methyl adenosine
  modified_base 13: mod_base = OTHER; note = 2'-deoxy 5-methylcytidine
  modified_base 16: mod_base = OTHER; note = 2'-O-methoxyethyl adenosine
  modified_base 17: mod_base = OTHER; note = 2'-O-methoxyethyl guanosine
  modified_base 18: mod_base = OTHER; note = 2'-O-methoxyethyl thymidine
  modified_base 19: mod_base = OTHER; note = 2'-O-methoxyethyl guanosine
  modified_base 20: mod_base = OTHER; note = 2'-O-methoxyethyl 5-methylcytidine
  misc_feature 1: note = RNA
  misc_feature 2: note = DNA
  misc_feature 3: note = RNA
  misc_feature 4: note = DNA
  misc_feature 5..6: note = RNA
  misc_feature 7..10: note = DNA
  misc_feature 11: note = RNA
  misc_feature 12..15: note = DNA
  misc_feature 16..20: note = RNA
gcagaggtgaagcgaagtgc

SEQ ID NO: 286 - DNA, 20 bp, synthetic construct
  source 1..20: mol_type = other DNA
  modified_base 1: mod_base = OTHER; note = 2'-O-methoxyethyl guanosine
  modified_base 2: mod_base = OTHER; note = 2'-deoxy 5-methylcytidine
  modified_base 3: mod_base = OTHER; note = 2'-O-methoxyethyl adenosine
  modified_base 5: mod_base = OTHER; note = Locked nucleic acid with adenine base
  modified_base 6: mod_base = OTHER; note = 2'-O-methyl guanosine
  modified_base 11: mod_base = OTHER; note = 2'-O-methyl adenosine
  modified_base 13: mod_base = OTHER; note = 2'-deoxy 5-methylcytidine
  modified_base 16: mod_base = OTHER; note = 2'-O-methoxyethyl adenosine
  modified_base 17: mod_base = OTHER; note = 2'-O-methoxyethyl guanosine
  modified_base 18: mod_base = OTHER; note = 2'-O-methoxyethyl thymidine
  modified_base 19: mod_base = OTHER; note = 2'-O-methoxyethyl guanosine
  modified_base 20: mod_base = OTHER; note = 2'-O-methoxyethyl 5-methylcytidine
  misc_feature 1: note = RNA
  misc_feature 2: note = DNA
  misc_feature 3: note = RNA
  misc_feature 4: note = DNA
  misc_feature 5..6: note = RNA
  misc_feature 7..10: note = DNA
  misc_feature 11: note = RNA
  misc_feature 12..15: note = DNA
  misc_feature 16..20: note = RNA
gcagaggtgaagcgaagtgc

SEQ ID NO: 287 - DNA, 20 bp, synthetic construct
  source 1..20: mol_type = other DNA
  modified_base 1: mod_base = OTHER; note = Locked nucleic acid with guanine base
  modified_base 2: mod_base = OTHER; note = 2'-deoxy 5-methylcytidine
  modified_base 3: mod_base = OTHER; note = 2'-O-methoxyethyl adenosine
  modified_base 4: mod_base = OTHER; note = 2'-O-methoxyethyl guanosine
  modified_base 5: mod_base = OTHER; note = 2'-O-methoxyethyl adenosine
  modified_base 10: mod_base = OTHER; note = 2'-O-methyl adenosine
  modified_base 13: mod_base = OTHER; note = 2'-deoxy 5-methylcytidine
  modified_base 15: mod_base = OTHER; note = 2'-O-methyl adenosine
  modified_base 16: mod_base = OTHER; note = 2'-O-methoxyethyl adenosine
  modified_base 17: mod_base = OTHER; note = 2'-O-methoxyethyl guanosine
  modified_base 18: mod_base = OTHER; note = 2'-O-methoxyethyl thymidine
  modified_base 19: mod_base = OTHER; note = 2'-O-methoxyethyl guanosine
  modified_base 20: mod_base = OTHER; note = 2'-O-methoxyethyl 5-methylcytidine
  misc_feature 1: note = RNA
  misc_feature 2: note = DNA
  misc_feature 3..5: note = RNA
  misc_feature 6..9: note = DNA
  misc_feature 10: note = RNA
  misc_feature 11..14: note = DNA
  misc_feature 15..20: note = RNA
gcagaggtgaagcgaagtgc

SEQ ID NO: 288 - DNA, 20 bp, synthetic construct
  source 1..20: mol_type = other DNA
  modified_base 1: mod_base = OTHER; note = 2'-O-methoxyethyl guanosine
  modified_base 2: mod_base = OTHER; note = 2'-deoxy 5-methylcytidine
  modified_base 3: mod_base = OTHER; note = Locked nucleic acid with adenine base
  modified_base 4: mod_base = OTHER; note = 2'-O-methoxyethyl guanosine
  modified_base 5: mod_base = OTHER; note = 2'-O-methoxyethyl adenosine
  modified_base 10: mod_base = OTHER; note = 2'-O-methyl adenosine
  modified_base 13: mod_base = OTHER; note = 2'-deoxy 5-methylcytidine
  modified_base 15: mod_base = OTHER; note = 2'-O-methyl adenosine
  modified_base 16: mod_base = OTHER; note = 2'-O-methoxyethyl adenosine
  modified_base 17: mod_base = OTHER; note = 2'-O-methoxyethyl guanosine
  modified_base 18: mod_base = OTHER; note = 2'-O-methoxyethyl thymidine
  modified_base 19: mod_base = OTHER; note = 2'-O-methoxyethyl guanosine
  modified_base 20: mod_base = OTHER; note = 2'-O-methoxyethyl 5-methylcytidine
  misc_feature 1: note = RNA
  misc_feature 2: note = DNA
  misc_feature 3..5: note = RNA
  misc_feature 6..9: note = DNA
  misc_feature 10: note = RNA
  misc_feature 11..14: note = DNA
  misc_feature 15..20: note = RNA
gcagaggtgaagcgaagtgc

SEQ ID NO: 289 - DNA, 20 bp, synthetic construct
  source 1..20: mol_type = other DNA
  modified_base 1: mod_base = OTHER; note = 2'-O-methoxyethyl guanosine
  modified_base 2: mod_base = OTHER; note = 2'-deoxy 5-methylcytidine
  modified_base 3: mod_base = OTHER; note = 2'-O-methoxyethyl adenosine
  modified_base 4: mod_base = OTHER; note = Locked nucleic acid with guanine base
  modified_base 5: mod_base = OTHER; note = 2'-O-methoxyethyl adenosine
  modified_base 10: mod_base = OTHER; note = 2'-O-methyl adenosine
  modified_base 13: mod_base = OTHER; note = 2'-deoxy 5-methylcytidine
  modified_base 15: mod_base = OTHER; note = 2'-O-methyl adenosine
  modified_base 16: mod_base = OTHER; note = 2'-O-methoxyethyl adenosine
  modified_base 17: mod_base = OTHER; note = 2'-O-methoxyethyl guanosine
  modified_base 18: mod_base = OTHER; note = 2'-O-methoxyethyl thymidine
  modified_base 19: mod_base = OTHER; note = 2'-O-methoxyethyl guanosine
  modified_base 20: mod_base = OTHER; note = 2'-O-methoxyethyl 5-methylcytidine
  misc_feature 1: note = RNA
  misc_feature 2: note = DNA
  misc_feature 3..5: note = RNA
  misc_feature 6..9: note = DNA
  misc_feature 10: note = RNA
  misc_feature 11..14: note = DNA
  misc_feature 15..20: note = RNA
gcagaggtgaagcgaagtgc

SEQ ID NO: 290 - DNA, 20 bp, synthetic construct
  source 1..20: mol_type = other DNA
  modified_base 1: mod_base = OTHER; note = 2'-O-methoxyethyl guanosine
  modified_base 2: mod_base = OTHER; note = 2'-deoxy 5-methylcytidine
  modified_base 3: mod_base = OTHER; note = 2'-O-methoxyethyl adenosine
  modified_base 4: mod_base = OTHER; note = 2'-O-methoxyethyl guanosine
  modified_base 5: mod_base = OTHER; note = Locked nucleic acid with adenine base
  modified_base 10: mod_base = OTHER; note = 2'-O-methyl adenosine
  modified_base 13: mod_base = OTHER; note = 2'-deoxy 5-methylcytidine
  modified_base 15: mod_base = OTHER; note = 2'-O-methyl adenosine
  modified_base 16: mod_base = OTHER; note = 2'-O-methoxyethyl adenosine
  modified_base 17: mod_base = OTHER; note = 2'-O-methoxyethyl guanosine
  modified_base 18: mod_base = OTHER; note = 2'-O-methoxyethyl thymidine
  modified_base 19: mod_base = OTHER; note = 2'-O-methoxyethyl guanosine
  modified_base 20: mod_base = OTHER; note = 2'-O-methoxyethyl 5-methylcytidine
  misc_feature 1: note = RNA
  misc_feature 2: note = DNA
  misc_feature 3..5: note = RNA
  misc_feature 6..9: note = DNA
  misc_feature 10: note = RNA
  misc_feature 11..14: note = DNA
  misc_feature 15..20: note = RNA
gcagaggtgaagcgaagtgc

SEQ ID NO: 291 - DNA, 20 bp, synthetic construct
  source 1..20: mol_type = other DNA
  modified_base 1: mod_base = OTHER; note = Locked nucleic acid with guanine base
  modified_base 2: mod_base = OTHER; note = 2'-deoxy 5-methylcytidine
  modified_base 3: mod_base = OTHER; note = 2'-O-methoxyethyl adenosine
  modified_base 5: mod_base = OTHER; note = 2'-O-methoxyethyl adenosine
  modified_base 10: mod_base = OTHER; note = 2'-O-methyl adenosine
  modified_base 13: mod_base = OTHER; note = 2'-deoxy 5-methylcytidine
  modified_base 15: mod_base = OTHER; note = 2'-O-methyl adenosine
  modified_base 16: mod_base = OTHER; note = 2'-O-methoxyethyl adenosine
  modified_base 17: mod_base = OTHER; note = 2'-O-methoxyethyl guanosine
  modified_base 18: mod_base = OTHER; note = 2'-O-methoxyethyl thymidine
  modified_base 19: mod_base = OTHER; note = 2'-O-methoxyethyl guanosine
  modified_base 20: mod_base = OTHER; note = 2'-O-methoxyethyl 5-methylcytidine
  misc_feature 1: note = RNA
  misc_feature 2: note = DNA
  misc_feature 3: note = RNA
  misc_feature 4: note = DNA
  misc_feature 5: note = RNA
  misc_feature 6..9: note = DNA
  misc_feature 10: note = RNA
  misc_feature 11..14: note = DNA
  misc_feature 15..20: note = RNA
gcagaggtgaagcgaagtgc

SEQ ID NO: 292 - DNA, 20 bp, synthetic construct
  source 1..20: mol_type = other DNA
  modified_base 1: mod_base = OTHER; note = 2'-O-methoxyethyl guanosine
  modified_base 2: mod_base = OTHER; note = 2'-deoxy 5-methylcytidine
  modified_base 3: mod_base = OTHER; note = Locked nucleic acid with adenine base
  modified_base 5: mod_base = OTHER; note = 2'-O-methoxyethyl adenosine
  modified_base 10: mod_base = OTHER; note = 2'-O-methyl adenosine
  modified_base 13: mod_base = OTHER; note = 2'-deoxy 5-methylcytidine
  modified_base 15: mod_base = OTHER; note = 2'-O-methyl adenosine
  modified_base 16: mod_base = OTHER; note = 2'-O-methoxyethyl adenosine
  modified_base 17: mod_base = OTHER; note = 2'-O-methoxyethyl guanosine
  modified_base 18: mod_base = OTHER; note = 2'-O-methoxyethyl thymidine
  modified_base 19: mod_base = OTHER; note = 2'-O-methoxyethyl guanosine
  modified_base 20: mod_base = OTHER; note = 2'-O-methoxyethyl 5-methylcytidine
  misc_feature 1: note = RNA
  misc_feature 2: note = DNA
  misc_feature 3: note = RNA
  misc_feature 4: note = DNA
  misc_feature 5: note = RNA
  misc_feature 6..9: note = DNA
  misc_feature 10: note = RNA
  misc_feature 11..14: note = DNA
  misc_feature 15..20: note = RNA
gcagaggtgaagcgaagtgc

SEQ ID NO: 293 - DNA, 20 bp, synthetic construct
  source 1..20: mol_type = other DNA
  modified_base 1: mod_base = OTHER; note = 2'-O-methoxyethyl guanosine
  modified_base 2: mod_base = OTHER; note = 2'-deoxy 5-methylcytidine
  modified_base 3: mod_base = OTHER; note = 2'-O-methoxyethyl adenosine
  modified_base 5: mod_base = OTHER; note = Locked nucleic acid with adenine base
  modified_base 10: mod_base = OTHER; note = 2'-O-methyl adenosine
  modified_base 13: mod_base = OTHER; note = 2'-deoxy 5-methylcytidine
  modified_base 15: mod_base = OTHER; note = 2'-O-methyl adenosine
  modified_base 16: mod_base = OTHER; note = 2'-O-methoxyethyl adenosine
  modified_base 17: mod_base = OTHER; note = 2'-O-methoxyethyl guanosine
  modified_base 18: mod_base = OTHER; note = 2'-O-methoxyethyl thymidine
  modified_base 19: mod_base = OTHER; note = 2'-O-methoxyethyl guanosine
  modified_base 20: mod_base = OTHER; note = 2'-O-methoxyethyl 5-methylcytidine
  misc_feature 1: note = RNA
  misc_feature 2: note = DNA
  misc_feature 3: note = RNA
  misc_feature 4: note = DNA
  misc_feature 5: note = RNA
  misc_feature 6..9: note = DNA
  misc_feature 10: note = RNA
  misc_feature 11..14: note = DNA
  misc_feature 15..20: note = RNA
gcagaggtgaagcgaagtgc

SEQ ID NO: 294 - DNA, 20 bp, synthetic construct
  source 1..20: mol_type = other DNA
  modified_base 1: mod_base = OTHER; note = Locked nucleic acid with guanine base
  modified_base 2: mod_base = OTHER; note = 2'-O-methoxyethyl 5-methylcytidine
  modified_base 3: mod_base = OTHER; note = Locked nucleic acid with adenine base
  modified_base 4: mod_base = OTHER; note = 2'-O-methoxyethyl guanosine
  modified_base 5: mod_base = OTHER; note = 2'-O-methoxyethyl adenosine
  modified_base 10: mod_base = OTHER; note = 2'-O-methoxyethyl adenosine
  modified_base 13: mod_base = OTHER; note = 2'-deoxy 5-methylcytidine
  modified_base 16: mod_base = OTHER; note = 2'-O-methoxyethyl adenosine
  modified_base 17: mod_base = OTHER; note = 2'-O-methoxyethyl guanosine
  modified_base 18: mod_base = OTHER; note = 2'-O-methoxyethyl thymidine
  modified_base 19: mod_base = OTHER; note = 2'-O-methoxyethyl guanosine
  modified_base 20: mod_base = OTHER; note = 2'-O-methoxyethyl 5-methylcytidine
  misc_feature 1..5: note = RNA
  misc_feature 6..9: note = DNA
  misc_feature 10: note = RNA
  misc_feature 11..15: note = DNA
  misc_feature 16..20: note = RNA
gcagaggtgaagcgaagtgc

SEQ ID NO: 295 - DNA, 20 bp, synthetic construct
  source 1..20: mol_type = other DNA
  modified_base 1: mod_base = OTHER; note = Locked nucleic acid with guanine base
  modified_base 2: mod_base = OTHER; note = Locked nucleic acid with 5-methylcytidine base
  modified_base 3: mod_base = OTHER; note = 2'-O-methoxyethyl adenosine
  modified_base 4: mod_base = OTHER; note = 2'-O-methoxyethyl guanosine
  modified_base 5: mod_base = OTHER; note = 2'-O-methoxyethyl adenosine
  modified_base 13: mod_base = OTHER; note = 2'-deoxy 5-methylcytidine
  modified_base 16: mod_base = OTHER; note = 2'-O-methoxyethyl adenosine
  modified_base 17: mod_base = OTHER; note = 2'-O-methoxyethyl guanosine
  modified_base 18: mod_base = OTHER; note = 2'-O-methoxyethyl thymidine
  modified_base 19: mod_base = OTHER; note = 2'-O-methoxyethyl guanosine
  modified_base 20: mod_base = OTHER; note = 2'-O-methoxyethyl 5-methylcytidine
  misc_feature 1..5: note = RNA
  misc_feature 6..15: note = DNA
  misc_feature 16..20: note = RNA
gcagaggtgaagcgaagtgc

SEQ ID NO: 296 - DNA, 20 bp, synthetic construct
  source 1..20: mol_type = other DNA
  modified_base 1: mod_base = OTHER; note = Locked nucleic acid with guanine base
  modified_base 2: mod_base = OTHER; note = 2'-O-methoxyethyl 5-methylcytidine
  modified_base 3: mod_base = OTHER; note = Locked nucleic acid with adenine base
  modified_base 4: mod_base = OTHER; note = 2'-O-methoxyethyl guanosine
  modified_base 5: mod_base = OTHER; note = 2'-O-methoxyethyl adenosine
  modified_base 13: mod_base = OTHER; note = 2'-deoxy 5-methylcytidine
  modified_base 16: mod_base = OTHER; note = 2'-O-methoxyethyl adenosine
  modified_base 17: mod_base = OTHER; note = 2'-O-methoxyethyl guanosine
  modified_base 18: mod_base = OTHER; note = 2'-O-methoxyethyl thymidine
  modified_base 19: mod_base = OTHER; note = 2'-O-methoxyethyl guanosine
  modified_base 20: mod_base = OTHER; note = 2'-O-methoxyethyl 5-methylcytidine
  misc_feature 1..5: note = RNA
  misc_feature 6..15: note = DNA
  misc_feature 16..20: note = RNA
gcagaggtgaagcgaagtgc

SEQ ID NO: 297 - DNA, 20 bp, synthetic construct
  source 1..20: mol_type = other DNA
  modified_base 1: mod_base = OTHER; note = Locked nucleic acid with guanine base
  modified_base 2: mod_base = OTHER; note = 2'-O-methoxyethyl 5-methylcytidine
  modified_base 3: mod_base = OTHER; note = Locked nucleic acid with adenine base
  modified_base 4: mod_base = OTHER; note = 2'-O-methoxyethyl guanosine
  modified_base 5: mod_base = OTHER; note = 2'-O-methoxyethyl adenosine
  modified_base 10: mod_base = OTHER; note = 2'-O-methoxyethyl adenosine
  modified_base 13: mod_base = OTHER; note = 2'-deoxy 5-methylcytidine
  modified_base 16: mod_base = OTHER; note = 2'-O-methoxyethyl adenosine
  modified_base 17: mod_base = OTHER; note = 2'-O-methoxyethyl guanosine
  modified_base 18: mod_base = OTHER; note = 2'-O-methoxyethyl uridine
  modified_base 19: mod_base = OTHER; note = 2'-O-methoxyethyl guanosine
  modified_base 20: mod_base = OTHER; note = 2'-O-methoxyethyl 5-methylcytidine
  misc_feature 1..5: note = RNA
  misc_feature 6..9: note = DNA
  misc_feature 10: note = RNA
  misc_feature 11..15: note = DNA
  misc_feature 16..20: note = RNA
gcagaggtgaagcgaagtgc

SEQ ID NO: 298 - DNA, 20 bp, synthetic construct
  source 1..20: mol_type = other DNA
  modified_base 1: mod_base = OTHER; note = Locked nucleic acid with guanine base
  modified_base 2: mod_base = OTHER; note = 2'-O-methoxyethyl 5-methylcytidine
  modified_base 3: mod_base = OTHER; note = Locked nucleic acid with adenine base
  modified_base 4: mod_base = OTHER; note = 2'-O-methoxyethyl guanosine
  modified_base 5: mod_base = OTHER; note = 2'-O-methoxyethyl adenosine
  modified_base 10: mod_base = OTHER; note = 2'-O-methyl adenosine
  modified_base 13: mod_base = OTHER; note = 2'-deoxy 5-methylcytidine
  modified_base 16: mod_base = OTHER; note = 2'-O-methoxyethyl adenosine
  modified_base 17: mod_base = OTHER; note = 2'-O-methoxyethyl guanosine
  modified_base 18: mod_base = OTHER; note = 2'-O-methoxyethyl uridine
  modified_base 19: mod_base = OTHER; note = 2'-O-methoxyethyl guanosine
  modified_base 20: mod_base = OTHER; note = 2'-O-methoxyethyl 5-methylcytidine
  misc_feature 1..5: note = RNA
  misc_feature 6..9: note = DNA
  misc_feature 10: note = RNA
  misc_feature 11..15: note = DNA
  misc_feature 16..20: note = RNA
gcagaggtgaagcgaagtgc

SEQ ID NO: 299 - DNA, 20 bp, synthetic construct
  source 1..20: mol_type = other DNA
  modified_base 1: mod_base = OTHER; note = 2'-O-methoxyethyl guanosine
  modified_base 2: mod_base = OTHER; note = Locked nucleic acid with 5-methylcytidine base
  modified_base 3: mod_base = OTHER; note = 2'-O-methoxyethyl adenosine
  modified_base 4: mod_base = OTHER; note = Locked nucleic acid with guanine base
  modified_base 5: mod_base = OTHER; note = 2'-O-methoxyethyl adenosine
  modified_base 10: mod_base = OTHER; note = 2'-O-methoxyethyl adenosine
  modified_base 13: mod_base = OTHER; note = 2'-deoxy 5-methylcytidine
  modified_base 16: mod_base = OTHER; note = 2'-O-methoxyethyl adenosine
  modified_base 17: mod_base = OTHER; note = 2'-O-methoxyethyl guanosine
  modified_base 18: mod_base = OTHER; note = 2'-O-methoxyethyl uridine
  modified_base 19: mod_base = OTHER; note = 2'-O-methoxyethyl guanosine
  modified_base 20: mod_base = OTHER; note = 2'-O-methoxyethyl 5-methylcytidine
  misc_feature 1..5: note = RNA
  misc_feature 6..9: note = DNA
  misc_feature 10: note = RNA
  misc_feature 11..15: note = DNA
  misc_feature 16..20: note = RNA
gcagaggtgaagcgaagtgc

SEQ ID NO: 300 - DNA, 20 bp, synthetic construct
  source 1..20: mol_type = other DNA
  modified_base 1: mod_base = OTHER; note = Locked nucleic acid with guanine base
  modified_base 2: mod_base = OTHER; note = Locked nucleic acid with 5-methylcytidine base
  modified_base 3: mod_base = OTHER; note = 2'-O-methoxyethyl adenosine
  modified_base 4: mod_base = OTHER; note = Locked nucleic acid with guanine base
  modified_base 5: mod_base = OTHER; note = 2'-O-methoxyethyl adenosine
  modified_base 10: mod_base = OTHER; note = 2'-O-methoxyethyl adenosine
  modified_base 13: mod_base = OTHER; note = 2'-deoxy 5-methylcytidine
  modified_base 16: mod_base = OTHER; note = 2'-O-methoxyethyl adenosine
  modified_base 17: mod_base = OTHER; note = 2'-O-methoxyethyl guanosine
  modified_base 18: mod_base = OTHER; note = 2'-O-methoxyethyl uridine
  modified_base 19: mod_base = OTHER; note = 2'-O-methoxyethyl guanosine
  modified_base 20: mod_base = OTHER; note = 2'-O-methoxyethyl 5-methylcytidine
  misc_feature 1..5: note = RNA
  misc_feature 6..9: note = DNA
  misc_feature 10: note = RNA
  misc_feature 11..15: note = DNA
  misc_feature 16..20: note = RNA
gcagaggtgaagcgaagtgc

SEQ ID NO: 301 - DNA, 20 bp, synthetic construct
  source 1..20: mol_type = other DNA
  modified_base 1: mod_base = OTHER; note = Locked nucleic acid with guanine base
  modified_base 2: mod_base = OTHER; note = 2'-O-methoxyethyl 5-methylcytidine
  modified_base 3: mod_base = OTHER; note = Locked nucleic acid with adenine base
  modified_base 4: mod_base = OTHER; note = 2'-O-methoxyethyl guanosine
  modified_base 5: mod_base = OTHER; note = Locked nucleic acid with adenine base
  modified_base 10: mod_base = OTHER; note = 2'-O-methoxyethyl adenosine
  modified_base 13: mod_base = OTHER; note = 2'-deoxy 5-methylcytidine
  modified_base 16: mod_base = OTHER; note = 2'-O-methoxyethyl adenosine
  modified_base 17: mod_base = OTHER; note = 2'-O-methoxyethyl guanosine
  modified_base 18: mod_base = OTHER; note = 2'-O-methoxyethyl uridine
  modified_base 19: mod_base = OTHER; note = 2'-O-methoxyethyl guanosine
  modified_base 20: mod_base = OTHER; note = 2'-O-methoxyethyl 5-methylcytidine
  misc_feature 1..5: note = RNA
  misc_feature 6..9: note = DNA
  misc_feature 10: note = RNA
  misc_feature 11..15: note = DNA
  misc_feature 16..20: note = RNA
gcagaggtgaagcgaagtgc

SEQ ID NO: 302 - DNA, 20 bp, synthetic construct
  source 1..20: mol_type = other DNA
  modified_base 1: mod_base = OTHER; note = 2'-O-methoxyethyl guanosine
  modified_base 2: mod_base = OTHER; note = 2'-O-methoxyethyl 5-methylcytidine
  modified_base 3: mod_base = OTHER; note = 2'-O-methoxyethyl adenosine
  modified_base 4: mod_base = OTHER; note = 2'-O-methoxyethyl guanosine
  modified_base 5: mod_base = OTHER; note = 2'-O-methoxyethyl adenosine
  modified_base 13: mod_base = OTHER; note = 2'-deoxy 5-methylcytidine
  modified_base 16: mod_base = OTHER; note = Locked nucleic acid with adenine base
  modified_base 17: mod_base = OTHER; note = Locked nucleic acid with guanine base
  modified_base 18: mod_base = OTHER; note = Locked nucleic acid with thymine base
  modified_base 19: mod_base = OTHER; note = Locked nucleic acid with guanine base
  modified_base 20: mod_base = OTHER; note = Locked nucleic acid with cytosine base
  misc_feature 1..5: note = RNA
  misc_feature 6..15: note = DNA
  misc_feature 16..20: note = RNA
gcagaggtgaagcgaagtgc

SEQ ID NO: 303 - DNA, 20 bp, synthetic construct
  source 1..20: mol_type = other DNA
  modified_base 1: mod_base = OTHER; note = 2'-O-methoxyethyl guanosine
  modified_base 2: mod_base = OTHER; note = 2'-O-methoxyethyl 5-methylcytidine
  modified_base 3: mod_base = OTHER; note = 2'-O-methoxyethyl guanosine
  modified_base 4: mod_base = OTHER; note = 2'-O-methoxyethyl adenosine
  modified_base 5: mod_base = OTHER; note = 2'-O-methoxyethyl adenosine
  modified_base 9: mod_base = OTHER; note = 2'-deoxy 5-methylcytidine
  modified_base 11: mod_base = OTHER; note = 2'-deoxy 5-methylcytidine
  modified_base 13: mod_base = OTHER; note = 2'-deoxy 5-methylcytidine
  modified_base 16: mod_base = OTHER; note = 2'-fluoro 2'-deoxyuridine
  modified_base 17: mod_base = OTHER; note = 2'fluoro 2'-deoxy cytidine
  modified_base 18: mod_base = OTHER; note = 2'fluoro 2'-deoxy cytidine
  modified_base 19: mod_base = OTHER; note = 2'fluoro 2'-deoxy guanosine
  modified_base 20: mod_base = OTHER; note = 2'fluoro 2'-deoxy guanosine
  misc_feature 1..5: note = RNA
  misc_feature 6..15: note = DNA
  misc_feature 16..20: note = RNA
gcgaagtgcacacggtccgg

SEQ ID NO: 304 - DNA, 20 bp, synthetic construct
  source 1..20: mol_type = other DNA
  modified_base 1: mod_base = OTHER; note = 2'-O-methoxyethyl guanosine
  modified_base 2: mod_base = OTHER; note = 2'-O-methoxyethyl 5-methylcytidine
  modified_base 3: mod_base = OTHER; note = 2'-O-methoxyethyl adenosine
  modified_base 4: mod_base = OTHER; note = 2'-O-methoxyethyl guanosine
  modified_base 5: mod_base = OTHER; note = 2'-O-methoxyethyl adenosine
  modified_base 13: mod_base = OTHER; note = 2'-deoxy 5-methylcytidine
  modified_base 16: mod_base = OTHER; note = 2'-fluoro 2'-deoxyadenosine
  modified_base 17: mod_base = OTHER; note = 2'fluoro 2'-deoxy guanosine
  modified_base 18: mod_base = OTHER; note = 2'-fluoro 2'-deoxyuridine
  modified_base 19: mod_base = OTHER; note = 2'fluoro 2'-deoxy guanosine
  modified_base 20: mod_base = OTHER; note = 2'fluoro 2'-deoxy cytidine
  misc_feature 1..5: note = RNA
  misc_feature 6..15: note = DNA
  misc_feature 16..20: note = RNA
gcagaggtgaagcgaagtgc

SEQ ID NO: 305 - DNA, 20 bp, synthetic construct
  source 1..20: mol_type = other DNA
  modified_base 1: mod_base = OTHER; note = 2'-O-methoxyethyl guanosine
  modified_base 2: mod_base = OTHER; note = 2'-O-methoxyethyl 5-methylcytidine
  modified_base 3: mod_base = OTHER; note = 2'-O-methoxyethyl adenosine
  modified_base 4: mod_base = OTHER; note = 2'-O-methoxyethyl guanosine
  modified_base 5: mod_base = OTHER; note = 2'-O-methoxyethyl adenosine
  modified_base 13: mod_base = OTHER; note = 2'-deoxy 5-methylcytidine
  modified_base 16: mod_base = OTHER; note = Locked nucleic acid with adenine base
  modified_base 17: mod_base = OTHER; note = 2'-O-methoxyethyl guanosine
  modified_base 18: mod_base = OTHER; note = 2'-O-methoxyethyl uridine
  modified_base 19: mod_base = OTHER; note = 2'-O-methoxyethyl guanosine
  modified_base 20: mod_base = OTHER; note = 2'-O-methoxyethyl 5-methylcytidine
  misc_feature 1..5: note = RNA
  misc_feature 6..15: note = DNA
  misc_feature 16..20: note = RNA
gcagaggtgaagcgaagtgc

SEQ ID NO: 306 - DNA, 20 bp, synthetic construct
  source 1..20: mol_type = other DNA
  modified_base 1: mod_base = OTHER; note = 2'-O-methoxyethyl guanosine
  modified_base 2: mod_base = OTHER; note = 2'-O-methoxyethyl 5-methylcytidine
  modified_base 3: mod_base = OTHER; note = 2'-O-methoxyethyl adenosine
  modified_base 4: mod_base = OTHER; note = 2'-O-methoxyethyl guanosine
  modified_base 5: mod_base = OTHER; note = 2'-O-methoxyethyl adenosine
  modified_base 13: mod_base = OTHER; note = 2'-deoxy 5-methylcytidine
  modified_base 16: mod_base = OTHER; note = Locked nucleic acid with adenine base
  modified_base 17: mod_base = OTHER; note = Locked nucleic acid with guanine base
  modified_base 18: mod_base = OTHER; note = 2'-O-methoxyethyl uridine
  modified_base 19: mod_base = OTHER; note = 2'-O-methoxyethyl guanosine
  modified_base 20: mod_base = OTHER; note = 2'-O-methoxyethyl 5-methylcytidine
  misc_feature 1..5: note = RNA
  misc_feature 6..15: note = DNA
  misc_feature 16..20: note = RNA
gcagaggtgaagcgaagtgc

SEQ ID NO: 307 - DNA, 20 bp, synthetic construct
  source 1..20: mol_type = other DNA
  modified_base 1: mod_base = OTHER; note = 2'-O-methoxyethyl guanosine
  modified_base 2: mod_base = OTHER; note = 2'-O-methoxyethyl 5-methylcytidine
  modified_base 3: mod_base = OTHER; note = 2'-O-methoxyethyl adenosine
  modified_base 4: mod_base = OTHER; note = 2'-O-methoxyethyl guanosine
  modified_base 5: mod_base = OTHER; note = 2'-O-methoxyethyl adenosine
  modified_base 13: mod_base = OTHER; note = 2'-deoxy 5-methylcytidine
  modified_base 16: mod_base = OTHER; note = Locked nucleic acid with adenine base
  modified_base 17: mod_base = OTHER; note = Locked nucleic acid with guanine base
  modified_base 18: mod_base = OTHER; note = Locked nucleic acid with thymine base
  modified_base 19: mod_base = OTHER; note = 2'-O-methoxyethyl guanosine
  modified_base 20: mod_base = OTHER; note = 2'-O-methoxyethyl 5-methylcytidine
  misc_feature 1..5: note = RNA
  misc_feature 6..15: note = DNA
  misc_feature 16..20: note = RNA
gcagaggtgaagcgaagtgc

SEQ ID NO: 308 - DNA, 20 bp, synthetic construct
  source 1..20: mol_type = other DNA
  modified_base 1: mod_base = OTHER; note = 2'-O-methoxyethyl guanosine
  modified_base 2: mod_base = OTHER; note = 2'-O-methoxyethyl 5-methylcytidine
  modified_base 3: mod_base = OTHER; note = 2'-O-methoxyethyl adenosine
  modified_base 4: mod_base = OTHER; note = 2'-O-methoxyethyl guanosine
  modified_base 5: mod_base = OTHER; note = 2'-O-methoxyethyl adenosine
  modified_base 13: mod_base = OTHER; note = 2'-deoxy 5-methylcytidine
  modified_base 16: mod_base = OTHER; note = Locked nucleic acid with adenine base
  modified_base 17: mod_base = OTHER; note = Locked nucleic acid with guanine base
  modified_base 18: mod_base = OTHER; note = Locked nucleic acid with thymine base
  modified_base 19: mod_base = OTHER; note = Locked nucleic acid with guanine base
  modified_base 20: mod_base = OTHER; note = 2'-O-methoxyethyl 5-methylcytidine
  misc_feature 1..5: note = RNA
  misc_feature 6..15: note = DNA
  misc_feature 16..20: note = RNA
gcagaggtgaagcgaagtgc

SEQ ID NO: 309 - DNA, 20 bp, synthetic construct
  source 1..20: mol_type = other DNA
  modified_base 1: mod_base = OTHER; note = 2'-O-methoxyethyl guanosine
  modified_base 2: mod_base = OTHER; note = 2'-O-methoxyethyl 5-methylcytidine
  modified_base 3: mod_base = OTHER; note = 2'-O-methoxyethyl adenosine
  modified_base 4: mod_base = OTHER; note = 2'-O-methoxyethyl guanosine
  modified_base 5: mod_base = OTHER; note = 2'-O-methoxyethyl adenosine
  modified_base 6: mod_base = OTHER; note = 2'-O-methyl guanosine
  modified_base 11: mod_base = OTHER; note = 2'-O-methyl adenosine
  modified_base 13: mod_base = OTHER; note = 2'-deoxy 5-methylcytidine
  modified_base 16: mod_base = OTHER; note = Locked nucleic acid with adenine base
  modified_base 17: mod_base = OTHER; note = Locked nucleic acid with guanine base
  modified_base 18: mod_base = OTHER; note = Locked nucleic acid with thymine base
  modified_base 19: mod_base = OTHER; note = 2'-O-methoxyethyl guanosine
  modified_base 20: mod_base = OTHER; note = 2'-O-methoxyethyl 5-methylcytidine
  misc_feature 1..6: note = RNA
  misc_feature 7..10: note = DNA
  misc_feature 11: note = RNA
  misc_feature 12..15: note = DNA
  misc_feature 16..20: note = RNA
gcagaggtgaagcgaagtgc

SEQ ID NO: 310 - DNA, 20 bp, synthetic construct
  source 1..20: mol_type = other DNA
  modified_base 1: mod_base = OTHER; note = 2'-O-methoxyethyl guanosine
  modified_base 2: mod_base = OTHER; note = 2'-O-methoxyethyl 5-methylcytidine
  modified_base 3: mod_base = OTHER; note = 2'-O-methoxyethyl adenosine
  modified_base 4: mod_base = OTHER; note = 2'-O-methoxyethyl guanosine
  modified_base 5: mod_base = OTHER; note = 2'-O-methoxyethyl adenosine
  modified_base 6: mod_base = OTHER; note = 2'-O-methyl guanosine
  modified_base 11: mod_base = OTHER; note = 2'-O-methyl adenosine
  modified_base 13: mod_base = OTHER; note = 2'-deoxy 5-methylcytidine
  modified_base 16: mod_base = OTHER; note = Locked nucleic acid with adenine base
  modified_base 17: mod_base = OTHER; note = Locked nucleic acid with guanine base
  modified_base 18: mod_base = OTHER; note = 2'-O-methoxyethyl thymidine
  modified_base 19: mod_base = OTHER; note = Locked nucleic acid with guanine base
  modified_base 20: mod_base = OTHER; note = 2'-O-methoxyethyl 5-methylcytidine
  misc_feature 1..6: note = RNA
  misc_feature 7..10: note = DNA
  misc_feature 11: note = RNA
  misc_feature 12..15: note = DNA
  misc_feature 16..20: note = RNA
gcagaggtgaagcgaagtgc

SEQ ID NO: 311 - DNA, 20 bp, synthetic construct
  source 1..20: mol_type = other DNA
  modified_base 1: mod_base = OTHER; note = 2'-O-methoxyethyl guanosine
  modified_base 2: mod_base = OTHER; note = 2'-O-methoxyethyl 5-methylcytidine
  modified_base 3: mod_base = OTHER; note = 2'-O-methoxyethyl adenosine
  modified_base 4: mod_base = OTHER; note = 2'-O-methoxyethyl guanosine
  modified_base 5: mod_base = OTHER; note = 2'-O-methoxyethyl adenosine
  modified_base 6: mod_base = OTHER; note = 2'-O-methyl guanosine
  modified_base 11: mod_base = OTHER; note = 2'-O-methyl adenosine
  modified_base 13: mod_base = OTHER; note = 2'-deoxy 5-methylcytidine
  modified_base 16: mod_base = OTHER; note = Locked nucleic acid with adenine base
  modified_base 17: mod_base = OTHER; note = Locked nucleic acid with guanine base
  modified_base 18: mod_base = OTHER; note = 2'-O-methoxyethyl thymidine
  modified_base 19: mod_base = OTHER; note = 2'-O-methoxyethyl guanosine
  modified_base 20: mod_base = OTHER; note = Locked nucleic acid with cytosine base
  misc_feature 1..6: note = RNA
  misc_feature 7..10: note = DNA
  misc_feature 11: note = RNA
  misc_feature 12..15: note = DNA
  misc_feature 16..20: note = RNA
gcagaggtgaagcgaagtgc

SEQ ID NO: 312 - DNA, 20 bp, synthetic construct
  source 1..20: mol_type = other DNA
  modified_base 1: mod_base = OTHER; note = 2'-O-methoxyethyl guanosine
  modified_base 2: mod_base = OTHER; note = 2'-O-methoxyethyl 5-methylcytidine
  modified_base 3: mod_base = OTHER; note = 2'-O-methoxyethyl adenosine
  modified_base 4: mod_base = OTHER; note = 2'-O-methoxyethyl guanosine
  modified_base 5: mod_base = OTHER; note = 2'-O-methoxyethyl adenosine
  modified_base 6: mod_base = OTHER; note = 2'-O-methyl guanosine
  modified_base 11: mod_base = OTHER; note = 2'-O-methyl adenosine
  modified_base 13: mod_base = OTHER; note = 2'-deoxy 5-methylcytidine
  modified_base 16: mod_base = OTHER; note = Locked nucleic acid with adenine base
  modified_base 17: mod_base = OTHER; note = 2'-O-methoxyethyl guanosine
  modified_base 18: mod_base = OTHER; note = Locked nucleic acid with thymine base
  modified_base 19: mod_base = OTHER; note = Locked nucleic acid with guanine base
  modified_base 20: mod_base = OTHER; note = 2'-O-methoxyethyl 5-methylcytidine
  misc_feature 1..6: note = RNA
  misc_feature 7..10: note = DNA
  misc_feature 11: note = RNA
  misc_feature 12..15: note = DNA
  misc_feature 16..20: note = RNA
gcagaggtgaagcgaagtgc

SEQ ID NO: 313 - DNA, 20 bp, synthetic construct
  source 1..20: mol_type = other DNA
  modified_base 1: mod_base = OTHER; note = 2'-O-methoxyethyl guanosine
  modified_base 2: mod_base = OTHER; note = 2'-O-methoxyethyl 5-methylcytidine
  modified_base 3: mod_base = OTHER; note = 2'-O-methoxyethyl adenosine
  modified_base 4: mod_base = OTHER; note = 2'-O-methoxyethyl guanosine
  modified_base 5: mod_base = OTHER; note = 2'-O-methoxyethyl adenosine
  modified_base 6: mod_base = OTHER; note = 2'-O-methyl guanosine
  modified_base 11: mod_base = OTHER; note = 2'-O-methyl adenosine
  modified_base 13: mod_base = OTHER; note = 2'-deoxy 5-methylcytidine
  modified_base 16: mod_base = OTHER; note = Locked nucleic acid with adenine base
  modified_base 17: mod_base = OTHER; note = 2'-O-methoxyethyl guanosine
  modified_base 18: mod_base = OTHER; note = Locked nucleic acid with thymine base
  modified_base 19: mod_base = OTHER; note = 2'-O-methoxyethyl guanosine
  modified_base 20: mod_base = OTHER; note = Locked nucleic acid with cytosine base
  misc_feature 1..6: note = RNA
  misc_feature 7..10: note = DNA
  misc_feature 11: note = RNA
  misc_feature 12..15: note = DNA
  misc_feature 16..20: note = RNA
gcagaggtgaagcgaagtgc

SEQ ID NO: 314 - DNA, 20 bp, synthetic construct
  source 1..20: mol_type = other DNA
  modified_base 1: mod_base = OTHER; note = 2'-O-methoxyethyl guanosine
  modified_base 2: mod_base = OTHER; note = 2'-O-methoxyethyl 5-methylcytidine
  modified_base 3: mod_base = OTHER; note = 2'-O-methoxyethyl adenosine
  modified_base 4: mod_base = OTHER; note = 2'-O-methoxyethyl guanosine
  modified_base 5: mod_base = OTHER; note = 2'-O-methoxyethyl adenosine
  modified_base 6: mod_base = OTHER; note = 2'-O-methyl guanosine
  modified_base 11: mod_base = OTHER; note = 2'-O-methyl adenosine
  modified_base 13: mod_base = OTHER; note = 2'-deoxy 5-methylcytidine
  modified_base 16: mod_base = OTHER; note = Locked nucleic acid with adenine base
  modified_base 17: mod_base = OTHER; note = 2'-O-methoxyethyl guanosine
  modified_base 18: mod_base = OTHER; note = 2'-O-methoxyethyl thymidine
  modified_base 19: mod_base = OTHER; note = Locked nucleic acid with guanine base
  modified_base 20: mod_base = OTHER; note = Locked nucleic acid with cytosine base
  misc_feature 1..6: note = RNA
  misc_feature 7..10: note = DNA
  misc_feature 11: note = RNA
  misc_feature 12..15: note = DNA
  misc_feature 16..20: note = RNA
gcagaggtgaagcgaagtgc

SEQ ID NO: 315 - DNA, 20 bp, synthetic construct
  source 1..20: mol_type = other DNA
  modified_base 1: mod_base = OTHER; note = 2'-O-methoxyethyl guanosine
  modified_base 2: mod_base = OTHER; note = 2'-O-methoxyethyl 5-methylcytidine
  modified_base 3: mod_base = OTHER; note = 2'-O-methoxyethyl adenosine
  modified_base 4: mod_base = OTHER; note = 2'-O-methoxyethyl guanosine
  modified_base 5: mod_base = OTHER; note = 2'-O-methoxyethyl adenosine
  modified_base 6: mod_base = OTHER; note = 2'-O-methyl guanosine
  modified_base 11: mod_base = OTHER; note = 2'-O-methyl adenosine
  modified_base 13: mod_base = OTHER; note = 2'-deoxy 5-methylcytidine
  modified_base 16: mod_base = OTHER; note = 2'-O-methoxyethyl adenosine
  modified_base 17: mod_base = OTHER; note = Locked nucleic acid with guanine base
  modified_base 18: mod_base = OTHER; note = Locked nucleic acid with thymine base
  modified_base 19: mod_base = OTHER; note = Locked nucleic acid with guanine base
  modified_base 20: mod_base = OTHER; note = 2'-O-methoxyethyl 5-methylcytidine
  misc_feature 1..6: note = RNA
  misc_feature 7..10: note = DNA
  misc_feature 11: note = RNA
  misc_feature 12..15: note = DNA
  misc_feature 16..20: note = RNA
gcagaggtgaagcgaagtgc

SEQ ID NO: 316 - DNA, 20 bp, synthetic construct
  source 1..20: mol_type = other DNA
  modified_base 1: mod_base = OTHER; note = 2'-O-methoxyethyl guanosine
  modified_base 2: mod_base = OTHER; note = 2'-O-methoxyethyl 5-methylcytidine
  modified_base 3: mod_base = OTHER; note = 2'-O-methoxyethyl adenosine
  modified_base 4: mod_base = OTHER; note = 2'-O-methoxyethyl guanosine
  modified_base 5: mod_base = OTHER; note = 2'-O-methoxyethyl adenosine
  modified_base 6: mod_base = OTHER; note = 2'-O-methyl guanosine
  modified_base 11: mod_base = OTHER; note = 2'-O-methyl adenosine
  modified_base 13: mod_base = OTHER; note = 2'-deoxy 5-methylcytidine
  modified_base 16: mod_base = OTHER; note = 2'-O-methoxyethyl adenosine
  modified_base 17: mod_base = OTHER; note = Locked nucleic acid with guanine base
  modified_base 18: mod_base = OTHER; note = Locked nucleic acid with thymine base
  modified_base 19: mod_base = OTHER; note = 2'-O-methoxyethyl guanosine
  modified_base 20: mod_base = OTHER; note = Locked nucleic acid with cytosine base
  misc_feature 1..6: note = RNA
  misc_feature 7..10: note = DNA
  misc_feature 11: note = RNA
  misc_feature 12..15: note = DNA
  misc_feature 16..20: note = RNA
gcagaggtgaagcgaagtgc

SEQ ID NO: 317 - DNA, 20 bp, synthetic construct
  source 1..20: mol_type = other DNA
  modified_base 1: mod_base = OTHER; note = 2'-O-methoxyethyl guanosine
  modified_base 2: mod_base = OTHER; note = 2'-O-methoxyethyl 5-methylcytidine
  modified_base 3: mod_base = OTHER; note = 2'-O-methoxyethyl adenosine
  modified_base 4: mod_base = OTHER; note = 2'-O-methoxyethyl guanosine
  modified_base 5: mod_base = OTHER; note = 2'-O-methoxyethyl adenosine
  modified_base 6: mod_base = OTHER; note = 2'-O-methyl guanosine
  modified_base 11: mod_base = OTHER; note = 2'-O-methyl adenosine
  modified_base 13: mod_base = OTHER; note = 2'-deoxy 5-methylcytidine
  modified_base 16: mod_base = OTHER; note = 2'-O-methoxyethyl adenosine
  modified_base 17: mod_base = OTHER; note = Locked nucleic acid with guanine base
  modified_base 18: mod_base = OTHER; note = 2'-O-methoxyethyl thymidine
  modified_base 19: mod_base = OTHER; note = Locked nucleic acid with guanine base
  modified_base 20: mod_base = OTHER; note = Locked nucleic acid with cytosine base
  misc_feature 1..6: note = RNA
  misc_feature 7..10: note = DNA
  misc_feature 11: note = RNA
  misc_feature 12..15: note = DNA
  misc_feature 16..20: note = RNA
gcagaggtgaagcgaagtgc

SEQ ID NO: 318 - DNA, 20 bp, synthetic construct
  source 1..20: mol_type = other DNA
  modified_base 1: mod_base = OTHER; note = 2'-O-methoxyethyl guanosine
  modified_base 2: mod_base = OTHER; note = 2'-O-methoxyethyl 5-methylcytidine
  modified_base 3: mod_base = OTHER; note = 2'-O-methoxyethyl adenosine
  modified_base 4: mod_base = OTHER; note = 2'-O-methoxyethyl guanosine
  modified_base 5: mod_base = OTHER; note = 2'-O-methoxyethyl adenosine
  modified_base 6: mod_base = OTHER; note = 2'-O-methyl guanosine
  modified_base 11: mod_base = OTHER; note = 2'-O-methyl adenosine
  modified_base 13: mod_base = OTHER; note = 2'-deoxy 5-methylcytidine
  modified_base 16: mod_base = OTHER; note = 2'-O-methoxyethyl adenosine
  modified_base 17: mod_base = OTHER; note = 2'-O-methoxyethyl guanosine
  modified_base 18: mod_base = OTHER; note = Locked nucleic acid with thymine base
  modified_base 19: mod_base = OTHER; note = Locked nucleic acid with guanine base
  modified_base 20: mod_base = OTHER; note = Locked nucleic acid with cytosine base
  misc_feature 1..6: note = RNA
  misc_feature 7..10: note = DNA
  misc_feature 11: note = RNA
  misc_feature 12..15: note = DNA
  misc_feature 16..20: note = RNA
gcagaggtgaagcgaagtgc

SEQ ID NO: 319 - DNA, 20 bp, synthetic construct
  source 1..20: mol_type = other DNA
  modified_base 1: mod_base = OTHER; note = 2'-O-methoxyethyl guanosine
  modified_base 2: mod_base = OTHER; note = 2'-O-methoxyethyl 5-methylcytidine
  modified_base 3: mod_base = OTHER; note = 2'-O-methoxyethyl adenosine
  modified_base 4: mod_base = OTHER; note = 2'-O-methoxyethyl guanosine
  modified_base 5: mod_base = OTHER; note = 2'-O-methoxyethyl adenosine
  modified_base 10: mod_base = OTHER; note = 2'-O-methyl adenosine
  modified_base 13: mod_base = OTHER; note = 2'-deoxy 5-methylcytidine
  modified_base 15: mod_base = OTHER; note = 2'-O-methyl adenosine
  modified_base 16: mod_base = OTHER; note = Locked nucleic acid with adenine base
  modified_base 17: mod_base = OTHER; note = Locked nucleic acid with guanine base
  modified_base 18: mod_base = OTHER; note = Locked nucleic acid with thymine base
  modified_base 19: mod_base = OTHER; note = 2'-O-methoxyethyl guanosine
  modified_base 20: mod_base = OTHER; note = 2'-O-methoxyethyl 5-methylcytidine
  misc_feature 1..5: note = RNA
  misc_feature 6..9: note = DNA
  misc_feature 10: note = RNA
  misc_feature 11..14: note = DNA
  misc_feature 15..20: note = RNA
gcagaggtgaagcgaagtgc

SEQ ID NO: 320 - DNA, 20 bp, synthetic construct
  source 1..20: mol_type = other DNA
  modified_base 1: mod_base = OTHER; note = 2'-O-methoxyethyl guanosine
  modified_base 2: mod_base = OTHER; note = 2'-O-methoxyethyl 5-methylcytidine
  modified_base 3: mod_base = OTHER; note = 2'-O-methoxyethyl adenosine
  modified_base 4: mod_base = OTHER; note = 2'-O-methoxyethyl guanosine
  modified_base 5: mod_base = OTHER; note = 2'-O-methoxyethyl adenosine
  modified_base 10: mod_base = OTHER; note = 2'-O-methyl adenosine
  modified_base 13: mod_base = OTHER; note = 2'-deoxy 5-methylcytidine
  modified_base 15: mod_base = OTHER; note = 2'-O-methyl adenosine
  modified_base 16: mod_base = OTHER; note = Locked nucleic acid with adenine base
  modified_base 17: mod_base = OTHER; note = Locked nucleic acid with guanine base
  modified_base 18: mod_base = OTHER; note = 2'-O-methoxyethyl thymidine
  modified_base 19: mod_base = OTHER; note = Locked nucleic acid with guanine base
  modified_base 20: mod_base = OTHER; note = 2'-O-methoxyethyl 5-methylcytidine
  misc_feature 1..5: note = RNA
  misc_feature 6..9: note = DNA
  misc_feature 10: note = RNA
  misc_feature 11..14: note = DNA
  misc_feature 15..20: note = RNA
gcagaggtgaagcgaagtgc

SEQ ID NO: 321 - DNA, 20 bp, synthetic construct
  source 1..20: mol_type = other DNA
  modified_base 1: mod_base = OTHER; note = 2'-O-methoxyethyl guanosine
  modified_base 2: mod_base = OTHER; note = 2'-O-methoxyethyl 5-methylcytidine
  modified_base 3: mod_base = OTHER; note = 2'-O-methoxyethyl adenosine
  modified_base 4: mod_base = OTHER; note = 2'-O-methoxyethyl guanosine
  modified_base 5: mod_base = OTHER; note = 2'-O-methoxyethyl adenosine
  modified_base 10: mod_base = OTHER; note = 2'-O-methyl adenosine
  modified_base 13: mod_base = OTHER; note = 2'-deoxy 5-methylcytidine
  modified_base 15: mod_base = OTHER; note = 2'-O-methyl adenosine
  modified_base 16: mod_base = OTHER; note = Locked nucleic acid with adenine base
  modified_base 17: mod_base = OTHER; note = Locked nucleic acid with guanine base
  modified_base 18: mod_base = OTHER; note = 2'-O-methoxyethyl thymidine
  modified_base 19: mod_base = OTHER; note = 2'-O-methoxyethyl guanosine
  modified_base 20: mod_base = OTHER; note = Locked nucleic acid with cytosine base
  misc_feature 1..5: note = RNA
  misc_feature 6..9: note = DNA
  misc_feature 10: note = RNA
  misc_feature 11..14: note = DNA
  misc_feature 15..20: note = RNA
gcagaggtgaagcgaagtgc

SEQ ID NO: 322 - DNA, 20 bp, synthetic construct
  source 1..20: mol_type = other DNA
  modified_base 1: mod_base = OTHER; note = 2'-O-methoxyethyl guanosine
  modified_base 2: mod_base = OTHER; note = 2'-O-methoxyethyl 5-methylcytidine
  modified_base 3: mod_base = OTHER; note = 2'-O-methoxyethyl adenosine
  modified_base 4: mod_base = OTHER; note = 2'-O-methoxyethyl guanosine
  modified_base 5: mod_base = OTHER; note = 2'-O-methoxyethyl adenosine
  modified_base 10: mod_base = OTHER; note = 2'-O-methyl adenosine
  modified_base 13: mod_base = OTHER; note = 2'-deoxy 5-methylcytidine
  modified_base 15: mod_base = OTHER; note = 2'-O-methyl adenosine
  modified_base 16: mod_base = OTHER; note = Locked nucleic acid with adenine base
  modified_base 17: mod_base = OTHER; note = 2'-O-methoxyethyl guanosine
  modified_base 18: mod_base = OTHER; note = Locked nucleic acid with thymine base
  modified_base 19: mod_base = OTHER; note = Locked nucleic acid with guanine base
  modified_base 20: mod_base = OTHER; note = 2'-O-methoxyethyl 5-methylcytidine
  misc_feature 1..5: note = RNA
  misc_feature 6..9: note = DNA
  misc_feature 10: note = RNA
  misc_feature 11..14: note = DNA
  misc_feature 15..20: note = RNA
gcagaggtgaagcgaagtgc

SEQ ID NO: 323 - DNA, 20 bp, synthetic construct
  source 1..20: mol_type = other DNA
  modified_base 1: mod_base = OTHER; note = 2'-O-methoxyethyl guanosine
  modified_base 2: mod_base = OTHER; note = 2'-O-methoxyethyl 5-methylcytidine
  modified_base 3: mod_base = OTHER; note = 2'-O-methoxyethyl adenosine
  modified_base 4: mod_base = OTHER; note = 2'-O-methoxyethyl guanosine
  modified_base 5: mod_base = OTHER; note = 2'-O-methoxyethyl adenosine
  modified_base 10: mod_base = OTHER; note = 2'-O-methyl adenosine
  modified_base 13: mod_base = OTHER; note = 2'-deoxy 5-methylcytidine
  modified_base 15: mod_base = OTHER; note = 2'-O-methyl adenosine
  modified_base 16: mod_base = OTHER; note = Locked nucleic acid with adenine base
  modified_base 17: mod_base = OTHER; note = 2'-O-methoxyethyl guanosine
  modified_base 18: mod_base = OTHER; note = Locked nucleic acid with thymine base
  modified_base 19: mod_base = OTHER; note = 2'-O-methoxyethyl guanosine
  modified_base 20: mod_base = OTHER; note = Locked nucleic acid with cytosine base
  misc_feature 1..5: note = RNA
  misc_feature 6..9: note = DNA
  misc_feature 10: note = RNA
  misc_feature 11..14: note = DNA
  misc_feature 15..20: note = RNA
gcagaggtgaagcgaagtgc

SEQ ID NO: 324 - DNA, 20 bp, synthetic construct
  source 1..20: mol_type = other DNA
  modified_base 1: mod_base = OTHER; note = 2'-O-methoxyethyl guanosine
  modified_base 2: mod_base = OTHER; note = 2'-O-methoxyethyl 5-methylcytidine
  modified_base 3: mod_base = OTHER; note = 2'-O-methoxyethyl adenosine
  modified_base 4: mod_base = OTHER; note = 2'-O-methoxyethyl guanosine
  modified_base 5: mod_base = OTHER; note = 2'-O-methoxyethyl adenosine
  modified_base 10: mod_base = OTHER; note = 2'-O-methyl adenosine
  modified_base 13: mod_base = OTHER; note = 2'-deoxy 5-methylcytidine
  modified_base 15: mod_base = OTHER; note = 2'-O-methyl adenosine
  modified_base 16: mod_base = OTHER; note = Locked nucleic acid with adenine base
  modified_base 17: mod_base = OTHER; note = 2'-O-methoxyethyl guanosine
  modified_base 18: mod_base = OTHER; note = 2'-O-methoxyethyl thymidine
  modified_base 19: mod_base = OTHER; note = Locked nucleic acid with guanine base
  modified_base 20: mod_base = OTHER; note = Locked nucleic acid with cytosine base
  misc_feature 1..5: note = RNA
  misc_feature 6..9: note = DNA
  misc_feature 10: note = RNA
  misc_feature 11..14: note = DNA
  misc_feature 15..20: note = RNA
gcagaggtgaagcgaagtgc

SEQ ID NO: 325 - DNA, 20 bp, synthetic construct
  source 1..20: mol_type = other DNA
  modified_base 1: mod_base = OTHER; note = 2'-O-methoxyethyl guanosine
  modified_base 2: mod_base = OTHER; note = 2'-O-methoxyethyl 5-methylcytidine
  modified_base 3: mod_base = OTHER; note = 2'-O-methoxyethyl adenosine
  modified_base 4: mod_base = OTHER; note = 2'-O-methoxyethyl guanosine
  modified_base 5: mod_base = OTHER; note = 2'-O-methoxyethyl adenosine
  modified_base 10: mod_base = OTHER; note = 2'-O-methyl adenosine
  modified_base 13: mod_base = OTHER; note = 2'-deoxy 5-methylcytidine
  modified_base 15: mod_base = OTHER; note = 2'-O-methyl adenosine
  modified_base 16: mod_base = OTHER; note = 2'-O-methoxyethyl adenosine
  modified_base 17: mod_base = OTHER; note = Locked nucleic acid with guanine base
  modified_base 18: mod_base = OTHER; note = Locked nucleic acid with thymine base
  modified_base 19: mod_base = OTHER; note = Locked nucleic acid with guanine base
  modified_base 20: mod_base = OTHER; note = 2'-O-methoxyethyl 5-methylcytidine
  misc_feature 1..5: note = RNA
  misc_feature 6..9: note = DNA
  misc_feature 10: note = RNA
  misc_feature 11..14: note = DNA
  misc_feature 15..20: note = RNA
gcagaggtgaagcgaagtgc

SEQ ID NO: 326 - DNA, 20 bp, synthetic construct
  source 1..20: mol_type = other DNA
  modified_base 1: mod_base = OTHER; note = 2'-O-methoxyethyl guanosine
  modified_base 2: mod_base = OTHER; note = 2'-O-methoxyethyl 5-methylcytidine
  modified_base 3: mod_base = OTHER; note = 2'-O-methoxyethyl adenosine
  modified_base 4: mod_base = OTHER; note = 2'-O-methoxyethyl guanosine
  modified_base 5: mod_base = OTHER; note = 2'-O-methoxyethyl adenosine
  modified_base 10: mod_base = OTHER; note = 2'-O-methyl adenosine
  modified_base 13: mod_base = OTHER; note = 2'-deoxy 5-methylcytidine
  modified_base 15: mod_base = OTHER; note = 2'-O-methyl adenosine
  modified_base 16: mod_base = OTHER; note = 2'-O-methoxyethyl adenosine
  modified_base 17: mod_base = OTHER; note = Locked nucleic acid with guanine base
  modified_base 18: mod_base = OTHER; note = Locked nucleic acid with thymine base
  modified_base 19: mod_base = OTHER; note = 2'-O-methoxyethyl guanosine
  modified_base 20: mod_base = OTHER; note = Locked nucleic acid with cytosine base
  misc_feature 1..5: note = RNA
  misc_feature 6..9: note = DNA
  misc_feature 10: note = RNA
  misc_feature 11..14: note = DNA
  misc_feature 15..20: note = RNA
gcagaggtgaagcgaagtgc

SEQ ID NO: 327 - DNA, 20 bp, synthetic construct
  source 1..20: mol_type = other DNA
  modified_base 1: mod_base = OTHER; note = 2'-O-methoxyethyl guanosine
  modified_base 2: mod_base = OTHER; note = 2'-O-methoxyethyl 5-methylcytidine
  modified_base 3: mod_base = OTHER; note = 2'-O-methoxyethyl adenosine
  modified_base 4: mod_base = OTHER; note = 2'-O-methoxyethyl guanosine
  modified_base 5: mod_base = OTHER; note = 2'-O-methoxyethyl adenosine
  modified_base 10: mod_base = OTHER; note = 2'-O-methyl adenosine
  modified_base 13: mod_base = OTHER; note = 2'-deoxy 5-methylcytidine
  modified_base 15: mod_base = OTHER; note = 2'-O-methyl adenosine
  modified_base 16: mod_base = OTHER; note = 2'-O-methoxyethyl adenosine
  modified_base 17: mod_base = OTHER; note = Locked nucleic acid with guanine base
  modified_base 18: mod_base = OTHER; note = 2'-O-methoxyethyl thymidine
  modified_base 19: mod_base = OTHER; note = Locked nucleic acid with guanine base
  modified_base 20: mod_base = OTHER; note = Locked nucleic acid with cytosine base
  misc_feature 1..5: note = RNA
  misc_feature 6..9: note = DNA
  misc_feature 10: note = RNA
  misc_feature 11..14: note = DNA
  misc_feature 15..20: note = RNA
gcagaggtgaagcgaagtgc

SEQ ID NO: 328 - DNA, 20 bp, synthetic construct
  source 1..20: mol_type = other DNA
  modified_base 1: mod_base = OTHER; note = 2'-O-methoxyethyl guanosine
  modified_base 2: mod_base = OTHER; note = 2'-O-methoxyethyl 5-methylcytidine
  modified_base 3: mod_base = OTHER; note = 2'-O-methoxyethyl adenosine
  modified_base 4: mod_base = OTHER; note = 2'-O-methoxyethyl guanosine
  modified_base 5: mod_base = OTHER; note = 2'-O-methoxyethyl adenosine
  modified_base 10: mod_base = OTHER; note = 2'-O-methyl adenosine
  modified_base 13: mod_base = OTHER; note = 2'-deoxy 5-methylcytidine
  modified_base 15: mod_base = OTHER; note = 2'-O-methyl adenosine
  modified_base 16: mod_base = OTHER; note = 2'-O-methoxyethyl adenosine
  modified_base 17: mod_base = OTHER; note = 2'-O-methoxyethyl guanosine
  modified_base 18: mod_base = OTHER; note = Locked nucleic acid with thymine base
  modified_base 19: mod_base = OTHER; note = Locked nucleic acid with guanine base
  modified_base 20: mod_base = OTHER; note = Locked nucleic acid with cytosine base
  misc_feature 1..5: note = RNA
  misc_feature 6..9: note = DNA
  misc_feature 10: note = RNA
  misc_feature 11..14: note = DNA
  misc_feature 15..20: note = RNA
gcagaggtgaagcgaagtgc

SEQ ID NO: 329 - DNA, 20 bp, synthetic construct
  source 1..20: mol_type = other DNA
  modified_base 1: mod_base = OTHER; note = 2'-O-methoxyethyl guanosine
  modified_base 2: mod_base = OTHER; note = 2'-O-methoxyethyl 5-methylcytidine
  modified_base 3: mod_base = OTHER; note = 2'-O-methoxyethyl adenosine
  modified_base 4: mod_base = OTHER; note = 2'-O-methoxyethyl guanosine
  modified_base 5: mod_base = OTHER; note = 2'-O-methoxyethyl adenosine
  modified_base 10: mod_base = OTHER; note = 2'-O-methoxyethyl adenosine
  modified_base 13: mod_base = OTHER; note = 2'-deoxy 5-methylcytidine
  modified_base 16: mod_base = OTHER; note = Locked nucleic acid with adenine base
  modified_base 17: mod_base = OTHER; note = Locked nucleic acid with guanine base
  modified_base 18: mod_base = OTHER; note = 2'-O-methoxyethyl uridine
  modified_base 19: mod_base = OTHER; note = 2'-O-methoxyethyl guanosine
  modified_base 20: mod_base = OTHER; note = 2'-O-methoxyethyl 5-methylcytidine
  misc_feature 1..5: note = RNA
  misc_feature 6..9: note = DNA
  misc_feature 10: note = RNA
  misc_feature 11..15: note = DNA
  misc_feature 16..20: note = RNA
gcagaggtgaagcgaagtgc

SEQ ID NO: 330 - DNA, 20 bp, synthetic construct
  source 1..20: mol_type = other DNA
  modified_base 1: mod_base = OTHER; note = 2'-O-methoxyethyl guanosine
  modified_base 2: mod_base = OTHER; note = 2'-O-methoxyethyl 5-methylcytidine
  modified_base 3: mod_base = OTHER; note = 2'-O-methoxyethyl adenosine
  modified_base 4: mod_base = OTHER; note = 2'-O-methoxyethyl guanosine
  modified_base 5: mod_base = OTHER; note = 2'-O-methoxyethyl adenosine
  modified_base 10: mod_base = OTHER; note = 2'-O-methoxyethyl adenosine
  modified_base 13: mod_base = OTHER; note = 2'-deoxy 5-methylcytidine
  modified_base 16: mod_base = OTHER; note = 2'-O-methoxyethyl adenosine
  modified_base 17: mod_base = OTHER; note = Locked nucleic acid with guanine base
  modified_base 18: mod_base = OTHER; note = 2'-O-methoxyethyl uridine
  modified_base 19: mod_base = OTHER; note = Locked nucleic acid with guanine base
  modified_base 20: mod_base = OTHER; note = Locked nucleic acid with 5-methylcytidine base
  misc_feature 1..5: note = RNA
  misc_feature 6..9: note = DNA
  misc_feature 10: note = RNA
  misc_feature 11..15: note = DNA
  misc_feature 16..20: note = RNA
gcagaggtgaagcgaagtgc

SEQ ID NO: 331 - DNA, 20 bp, synthetic construct
  source 1..20: mol_type = other DNA
  modified_base 1: mod_base = OTHER; note = 2'-O-methoxyethyl guanosine
  modified_base 2: mod_base = OTHER; note = 2'-O-methoxyethyl 5-methylcytidine
  modified_base 3: mod_base = OTHER; note = 2'-O-methoxyethyl adenosine
  modified_base 4: mod_base = OTHER; note = 2'-O-methoxyethyl guanosine
  modified_base 5: mod_base = OTHER; note = 2'-O-methoxyethyl adenosine
  modified_base 10: mod_base = OTHER; note = 2'-O-methoxyethyl adenosine
  modified_base 13: mod_base = OTHER; note = 2'-deoxy 5-methylcytidine
  modified_base 16: mod_base = OTHER; note = 2'-O-methoxyethyl adenosine
  modified_base 17: mod_base = OTHER; note = Locked nucleic acid with guanine base
  modified_base 18: mod_base = OTHER; note = Locked nucleic acid with thymine base
  modified_base 19: mod_base = OTHER; note = Locked nucleic acid with guanine base
  modified_base 20: mod_base = OTHER; note = 2'-O-methoxyethyl 5-methylcytidine
  misc_feature 1..5: note = RNA
  misc_feature 6..9: note = DNA
  misc_feature 10: note = RNA
  misc_feature 11..15: note = DNA
  misc_feature 16..20: note = RNA
gcagaggtgaagcgaagtgc

SEQ ID NO: 332 - DNA, 20 bp, synthetic construct
  source 1..20: mol_type = other DNA
  modified_base 1: mod_base = OTHER; note = Locked nucleic acid with guanine base
  modified_base 2: mod_base = OTHER; note = Locked nucleic acid with cytosine base
  modified_base 3: mod_base = OTHER; note = Locked nucleic acid with adenine base
  modified_base 4: mod_base = OTHER; note = Locked nucleic acid with guanine base
  modified_base 5: mod_base = OTHER; note = Locked nucleic acid with adenine base
  modified_base 13: mod_base = OTHER; note = 2'-deoxy 5-methylcytidine
  modified_base 16: mod_base = OTHER; note = Locked nucleic acid with adenine base
  modified_base 17: mod_base = OTHER; note = Locked nucleic acid with guanine base
  modified_base 18: mod_base = OTHER; note = Locked nucleic acid with thymine base
  modified_base 19: mod_base = OTHER; note = Locked nucleic acid with guanine base
  modified_base 20: mod_base = OTHER; note = Locked nucleic acid with cytosine base
  misc_feature 1..5: note = RNA
  misc_feature 6..15: note = DNA
  misc_feature 16..20: note = RNA
gcagaggtgaagcgaagtgc

SEQ ID NO: 333 - DNA, 20 bp, synthetic construct
  source 1..20: mol_type = other DNA
  modified_base 1: mod_base = OTHER; note = Locked nucleic acid with guanine base
  modified_base 2: mod_base = OTHER; note = Locked nucleic acid with cytosine base
  modified_base 3: mod_base = OTHER; note = 2'-O-methoxyethyl adenosine
  modified_base 4: mod_base = OTHER; note = 2'-O-methoxyethyl guanosine
  modified_base 5: mod_base = OTHER; note = 2'-O-methoxyethyl adenosine
  modified_base 6: mod_base = OTHER; note = 2'-O-methoxyethyl guanosine
  modified_base 7: mod_base = OTHER; note = 2'-O-methoxyethyl guanosine
  modified_base 8: mod_base = OTHER; note = 2'-O-methoxyethyl thymidine
  modified_base 9: mod_base = OTHER; note = 2'-O-methoxyethyl guanosine
  modified_base 10: mod_base = OTHER; note = 2'-O-methoxyethyl adenosine
  modified_base 11: mod_base = OTHER; note = 2'-O-methoxyethyl adenosine
  modified_base 12: mod_base = OTHER; note = 2'-O-methoxyethyl guanosine
  modified_base 13: mod_base = OTHER; note = 2'-O-methoxyethyl 5-methylcytidine
  modified_base 14: mod_base = OTHER; note = 2'-O-methoxyethyl guanosine
  modified_base 15: mod_base = OTHER; note = 2'-O-methoxyethyl adenosine
  modified_base 16: mod_base = OTHER; note = 2'-O-methoxyethyl adenosine
  modified_base 17: mod_base = OTHER; note = 2'-O-methoxyethyl guanosine
  modified_base 18: mod_base = OTHER; note = 2'-O-methoxyethyl thymidine
  modified_base 19: mod_base = OTHER; note = Locked nucleic acid with guanine base
  modified_base 20: mod_base = OTHER; note = Locked nucleic acid with cytosine base
  misc_feature 1..20: note = RNA
gcagaggtgaagcgaagtgc

SEQ ID NO: 334 - DNA, 20 bp, synthetic construct
  source 1..20: mol_type = other DNA
  modified_base 1: mod_base = OTHER; note = Locked nucleic acid with guanine base
  modified_base 2: mod_base = OTHER; note = 2'-O-methoxyethyl 5-methylcytidine
  modified_base 3: mod_base = OTHER; note = Locked nucleic acid with adenine base
  modified_base 4: mod_base = OTHER; note = 2'-O-methoxyethyl guanosine
  modified_base 5: mod_base = OTHER; note = 2'-O-methoxyethyl adenosine
  modified_base 13: mod_base = OTHER; note = 2'-deoxy 5-methylcytidine
  modified_base 16: mod_base = OTHER; note = 2'-fluoro 2'-deoxyadenosine
  modified_base 17: mod_base = OTHER; note = 2'fluoro 2'-deoxy guanosine
  modified_base 18: mod_base = OTHER; note = 2'-fluoro 2'-deoxyuridine
  modified_base 19: mod_base = OTHER; note = 2'fluoro 2'-deoxy guanosine
  modified_base 20: mod_base = OTHER; note = 2'fluoro 2'-deoxy cytidine
  misc_feature 1..5: note = RNA
  misc_feature 6..15: note = DNA
  misc_feature 16..20: note = RNA
gcagaggtgaagcgaagtgc

SEQ ID NO: 335 - DNA, 20 bp, synthetic construct
  source 1..20: mol_type = other DNA
  modified_base 1: mod_base = OTHER; note = Locked nucleic acid with guanine base
  modified_base 2: mod_base = OTHER; note = 2'-O-methoxyethyl 5-methylcytidine
  modified_base 3: mod_base = OTHER; note = Locked nucleic acid with adenine base
  modified_base 4: mod_base = OTHER; note = Locked nucleic acid with guanine base
  modified_base 5: mod_base = OTHER; note = 2'-O-methoxyethyl adenosine
  modified_base 13: mod_base = OTHER; note = 2'-deoxy 5-methylcytidine
  modified_base 16: mod_base = OTHER; note = 2'-fluoro 2'-deoxyadenosine
  modified_base 17: mod_base = OTHER; note = 2'fluoro 2'-deoxy guanosine
  modified_base 18: mod_base = OTHER; note = 2'-fluoro 2'-deoxyuridine
  modified_base 19: mod_base = OTHER; note = 2'fluoro 2'-deoxy guanosine
  modified_base 20: mod_base = OTHER; note = 2'fluoro 2'-deoxy cytidine
  misc_feature 1..5: note = RNA
  misc_feature 6..15: note = DNA
  misc_feature 16..20: note = RNA
gcagaggtgaagcgaagtgc

SEQ ID NO: 336 - DNA, 20 bp, synthetic construct
  source 1..20: mol_type = other DNA
  modified_base 1: mod_base = OTHER; note = Locked nucleic acid with guanine base
  modified_base 2: mod_base = OTHER; note = 2'-deoxy 5-methylcytidine
  modified_base 3: mod_base = OTHER; note = Locked nucleic acid with adenine base
  modified_base 4: mod_base = OTHER; note = 2'-O-methoxyethyl guanosine
  modified_base 5: mod_base = OTHER; note = 2'-O-methoxyethyl adenosine
  modified_base 6: mod_base = OTHER; note = 2'-O-methyl guanosine
  modified_base 11: mod_base = OTHER; note = 2'-O-methyl adenosine
  modified_base 13: mod_base = OTHER; note = 2'-deoxy 5-methylcytidine
  modified_base 16: mod_base = OTHER; note = Locked nucleic acid with adenine base
  modified_base 17: mod_base = OTHER; note = Locked nucleic acid with guanine base
  modified_base 18: mod_base = OTHER; note = 2'-O-methoxyethyl uridine
  modified_base 19: mod_base = OTHER; note = 2'-O-methoxyethyl guanosine
  modified_base 20: mod_base = OTHER; note = 2'-O-methoxyethyl 5-methylcytidine
  misc_feature 1: note = RNA
  misc_feature 2: note = DNA
  misc_feature 3..6: note = RNA
  misc_feature 7..10: note = DNA
  misc_feature 11: note = RNA
  misc_feature 12..15: note = DNA
  misc_feature 16..20: note = RNA
gcagaggtgaagcgaagtgc

SEQ ID NO: 337 - DNA, 20 bp, synthetic construct
  source 1..20: mol_type = other DNA
  modified_base 1: mod_base = OTHER; note = Locked nucleic acid with guanine base
  modified_base 2: mod_base = OTHER; note = 2'-deoxy 5-methylcytidine
  modified_base 3: mod_base = OTHER; note = Locked nucleic acid with adenine base
  modified_base 5: mod_base = OTHER; note = 2'-O-methoxyethyl adenosine
  modified_base 6: mod_base = OTHER; note = 2'-O-methyl guanosine
  modified_base 11: mod_base = OTHER; note = 2'-O-methyl adenosine
  modified_base 13: mod_base = OTHER; note = 2'-deoxy 5-methylcytidine
  modified_base 16: mod_base = OTHER; note = Locked nucleic acid with adenine base
  modified_base 17: mod_base = OTHER; note = Locked nucleic acid with guanine base
  modified_base 18: mod_base = OTHER; note = 2'-O-methoxyethyl uridine
  modified_base 19: mod_base = OTHER; note = 2'-O-methoxyethyl guanosine
  modified_base 20: mod_base = OTHER; note = 2'-O-methoxyethyl 5-methylcytidine
  misc_feature 1: note = RNA
  misc_feature 2: note = DNA
  misc_feature 3: note = RNA
  misc_feature 4: note = DNA
  misc_feature 5..6: note = RNA
  misc_feature 7..10: note = DNA
  misc_feature 11: note = RNA
  misc_feature 12..15: note = DNA
  misc_feature 16..20: note = RNA
gcagaggtgaagcgaagtgc

SEQ ID NO: 338 - DNA, 20 bp, synthetic construct
  source 1..20: mol_type = other DNA
  modified_base 1: mod_base = OTHER; note = Locked nucleic acid with guanine base
  modified_base 2: mod_base = OTHER; note = 2'-deoxy 5-methylcytidine
  modified_base 3: mod_base = OTHER; note = Locked nucleic acid with adenine base
  modified_base 4: mod_base = OTHER; note = 2'-O-methoxyethyl guanosine
  modified_base 5: mod_base = OTHER; note = 2'-O-methoxyethyl adenosine
  modified_base 10: mod_base = OTHER; note = 2'-O-methyl adenosine
  modified_base 13: mod_base = OTHER; note = 2'-deoxy 5-methylcytidine
  modified_base 15: mod_base = OTHER; note = 2'-O-methyl adenosine
  modified_base 16: mod_base = OTHER; note = Locked nucleic acid with adenine base
  modified_base 17: mod_base = OTHER; note = Locked nucleic acid with guanine base
  modified_base 18: mod_base = OTHER; note = 2'-O-methoxyethyl uridine
  modified_base 19: mod_base = OTHER; note = 2'-O-methoxyethyl guanosine
  modified_base 20: mod_base = OTHER; note = 2'-O-methoxyethyl 5-methylcytidine
  misc_feature 1: note = RNA
  misc_feature 2: note = DNA
  misc_feature 3..5: note = RNA
  misc_feature 6..9: note = DNA
  misc_feature 10: note = RNA
  misc_feature 11..14: note = DNA
  misc_feature 15..20: note = RNA
gcagaggtgaagcgaagtgc

SEQ ID NO: 339 - DNA, 20 bp, synthetic construct
  source 1..20: mol_type = other DNA
  modified_base 1: mod_base = OTHER; note = Locked nucleic acid with guanine base
  modified_base 2: mod_base = OTHER; note = 2'-deoxy 5-methylcytidine
  modified_base 3: mod_base = OTHER; note = Locked nucleic acid with adenine base
  modified_base 5: mod_base = OTHER; note = 2'-O-methoxyethyl adenosine
  modified_base 10: mod_base = OTHER; note = 2'-O-methyl adenosine
  modified_base 13: mod_base = OTHER; note = 2'-deoxy 5-methylcytidine
  modified_base 15: mod_base = OTHER; note = 2'-O-methyl adenosine
  modified_base 16: mod_base = OTHER; note = Locked nucleic acid with adenine base
  modified_base 17: mod_base = OTHER; note = Locked nucleic acid with guanine base
  modified_base 18: mod_base = OTHER; note = 2'-O-methoxyethyl uridine
  modified_base 19: mod_base = OTHER; note = 2'-O-methoxyethyl guanosine
  modified_base 20: mod_base = OTHER; note = 2'-O-methoxyethyl 5-methylcytidine
  misc_feature 1: note = RNA
  misc_feature 2: note = DNA
  misc_feature 3: note = RNA
  misc_feature 4: note = DNA
  misc_feature 5: note = RNA
  misc_feature 6..9: note = DNA
  misc_feature 10: note = RNA
  misc_feature 11..14: note = DNA
  misc_feature 15..20: note = RNA
gcagaggtgaagcgaagtgc

SEQ ID NO: 340 - DNA, 20 bp, synthetic construct
  source 1..20: mol_type = other DNA
  modified_base 1: mod_base = OTHER; note = 2'-O-methoxyethyl guanosine
  modified_base 2: mod_base = OTHER; note = 2'-deoxy 5-methylcytidine
  modified_base 3: mod_base = OTHER; note = Locked nucleic acid with adenine base
  modified_base 4: mod_base = OTHER; note = 2'-O-methoxyethyl guanosine
  modified_base 5: mod_base = OTHER; note = 2'-O-methoxyethyl adenosine
  modified_base 6: mod_base = OTHER; note = 2'-O-methyl guanosine
  modified_base 11: mod_base = OTHER; note = 2'-O-methyl adenosine
  modified_base 13: mod_base = OTHER; note = 2'-deoxy 5-methylcytidine
  modified_base 16: mod_base = OTHER; note = Locked nucleic acid with adenine base
  modified_base 17: mod_base = OTHER; note = Locked nucleic acid with guanine base
  modified_base 18: mod_base = OTHER; note = Locked nucleic acid with thymine base
  modified_base 19: mod_base = OTHER; note = 2'-O-methoxyethyl guanosine
  modified_base 20: mod_base = OTHER; note = 2'-O-methoxyethyl 5-methylcytidine
  misc_feature 1: note = RNA
  misc_feature 2: note = DNA
  misc_feature 3..6: note = RNA
  misc_feature 7..10: note = DNA
  misc_feature 11: note = RNA
  misc_feature 12..15: note = DNA
  misc_feature 16..20: note = RNA
gcagaggtgaagcgaagtgc

SEQ ID NO: 341 - DNA, 20 bp, synthetic construct
  source 1..20: mol_type = other DNA
  modified_base 1: mod_base = OTHER; note = 2'-O-methoxyethyl guanosine
  modified_base 2: mod_base = OTHER; note = 2'-deoxy 5-methylcytidine
  modified_base 3: mod_base = OTHER; note = Locked nucleic acid with adenine base
  modified_base 4: mod_base = OTHER; note = 2'-O-methoxyethyl guanosine
  modified_base 5: mod_base = OTHER; note = 2'-O-methoxyethyl adenosine
  modified_base 6: mod_base = OTHER; note = 2'-O-methyl guanosine
  modified_base 11: mod_base = OTHER; note = 2'-O-methyl adenosine
  modified_base 13: mod_base = OTHER; note = 2'-deoxy 5-methylcytidine
  modified_base 16: mod_base = OTHER; note = Locked nucleic acid with adenine base
  modified_base 17: mod_base = OTHER; note = 2'-O-methoxyethyl guanosine
  modified_base 18: mod_base = OTHER; note = Locked nucleic acid with thymine base
  modified_base 19: mod_base = OTHER; note = 2'-O-methoxyethyl guanosine
  modified_base 20: mod_base = OTHER; note = Locked nucleic acid with 5-methylcytidine base
  misc_feature 1: note = RNA
  misc_feature 2: note = DNA
  misc_feature 3..6: note = RNA
  misc_feature 7..10: note = DNA
  misc_feature 11: note = RNA
  misc_feature 12..15: note = DNA
  misc_feature 16..20: note = RNA
gcagaggtgaagcgaagtgc

SEQ ID NO: 342 - DNA, 20 bp, synthetic construct
  source 1..20: mol_type = other DNA
  modified_base 1: mod_base = OTHER; note = 2'-O-methoxyethyl guanosine
  modified_base 2: mod_base = OTHER; note = 2'-O-methoxyethyl 5-methylcytidine
  modified_base 3: mod_base = OTHER; note = Locked nucleic acid with adenine base
  modified_base 4: mod_base = OTHER; note = 2'-O-methoxyethyl guanosine
  modified_base 5: mod_base = OTHER; note = 2'-O-methoxyethyl adenosine
  modified_base 6: mod_base = OTHER; note = 2'-O-methyl guanosine
  modified_base 11: mod_base = OTHER; note = 2'-O-methyl adenosine
  modified_base 13: mod_base = OTHER; note = 2'-deoxy 5-methylcytidine
  modified_base 16: mod_base = OTHER; note = Locked nucleic acid with adenine base
  modified_base 17: mod_base = OTHER; note = 2'-O-methoxyethyl guanosine
  modified_base 18: mod_base = OTHER; note = Locked nucleic acid with thymine base
  modified_base 19: mod_base = OTHER; note = 2'-O-methoxyethyl guanosine
  modified_base 20: mod_base = OTHER; note = Locked nucleic acid with 5-methylcytidine base
  misc_feature 1..6: note = RNA
  misc_feature 7..10: note = DNA
  misc_feature 11: note = RNA
  misc_feature 12..15: note = DNA
  misc_feature 16..20: note = RNA
gcagaggtgaagcgaagtgc

SEQ ID NO: 343 - DNA, 20 bp, synthetic construct
  source 1..20: mol_type = other DNA
  modified_base 1: mod_base = OTHER; note = 2'-O-methoxyethyl guanosine
  modified_base 2: mod_base = OTHER; note = 2'-deoxy 5-methylcytidine
  modified_base 3: mod_base = OTHER; note = Locked nucleic acid with adenine base
  modified_base 5: mod_base = OTHER; note = 2'-O-methoxyethyl adenosine
  modified_base 6: mod_base = OTHER; note = 2'-O-methyl guanosine
  modified_base 11: mod_base = OTHER; note = 2'-O-methyl adenosine
  modified_base 13: mod_base = OTHER; note = 2'-deoxy 5-methylcytidine
  modified_base 16: mod_base = OTHER; note = Locked nucleic acid with adenine base
  modified_base 17: mod_base = OTHER; note = 2'-O-methoxyethyl guanosine
  modified_base 18: mod_base = OTHER; note = Locked nucleic acid with thymine base
  modified_base 19: mod_base = OTHER; note = 2'-O-methoxyethyl guanosine
  modified_base 20: mod_base = OTHER; note = Locked nucleic acid with 5-methylcytidine base
  misc_feature 1: note = RNA
  misc_feature 2: note = DNA
  misc_feature 3: note = RNA
  misc_feature 4: note = DNA
  misc_feature 5..6: note = RNA
  misc_feature 7..10: note = DNA
  misc_feature 11: note = RNA
  misc_feature 12..15: note = DNA
  misc_feature 16..20: note = RNA
gcagaggtgaagcgaagtgc

SEQ ID NO: 344 - DNA, 20 bp, synthetic construct
  source 1..20: mol_type = other DNA
  modified_base 1: mod_base = OTHER; note = 2'-O-methoxyethyl guanosine
  modified_base 2: mod_base = OTHER; note = 2'-deoxy 5-methylcytidine
  modified_base 3: mod_base = OTHER; note = Locked nucleic acid with adenine base
  modified_base 4: mod_base = OTHER; note = 2'-O-methoxyethyl guanosine
  modified_base 5: mod_base = OTHER; note = 2'-O-methoxyethyl adenosine
  modified_base 10: mod_base = OTHER; note = 2'-O-methyl adenosine
  modified_base 13: mod_base = OTHER; note = 2'-deoxy 5-methylcytidine
  modified_base 15: mod_base = OTHER; note = 2'-O-methyl adenosine
  modified_base 16: mod_base = OTHER; note = Locked nucleic acid with adenine base
  modified_base 17: mod_base = OTHER; note = Locked nucleic acid with guanine base
  modified_base 18: mod_base = OTHER; note = Locked nucleic acid with thymine base
  modified_base 19: mod_base = OTHER; note = 2'-O-methoxyethyl guanosine
  modified_base 20: mod_base = OTHER; note = 2'-O-methoxyethyl 5-methylcytidine
  misc_feature 1: note = RNA
  misc_feature 2: note = DNA
  misc_feature 3..5: note = RNA
  misc_feature 6..9: note = DNA
  misc_feature 10: note = RNA
  misc_feature 11..14: note = DNA
  misc_feature 15..20: note = RNA
gcagaggtgaagcgaagtgc

SEQ ID NO: 345 - DNA, 20 bp, synthetic construct
  source 1..20: mol_type = other DNA
  modified_base 1: mod_base = OTHER; note = 2'-O-methoxyethyl guanosine
  modified_base 2: mod_base = OTHER; note = 2'-deoxy 5-methylcytidine
  modified_base 3: mod_base = OTHER; note = Locked nucleic acid with adenine base
  modified_base 4: mod_base = OTHER; note = 2'-O-methoxyethyl guanosine
  modified_base 5: mod_base = OTHER; note = 2'-O-methoxyethyl adenosine
  modified_base 10: mod_base = OTHER; note = 2'-O-methyl adenosine
  modified_base 13: mod_base = OTHER; note = 2'-deoxy 5-methylcytidine
  modified_base 15: mod_base = OTHER; note = 2'-O-methyl adenosine
  modified_base 16: mod_base = OTHER; note = Locked nucleic acid with adenine base
  modified_base 17: mod_base = OTHER; note = 2'-O-methoxyethyl guanosine
  modified_base 18: mod_base = OTHER; note = Locked nucleic acid with thymine base
  modified_base 19: mod_base = OTHER; note = 2'-O-methoxyethyl guanosine
  modified_base 20: mod_base = OTHER; note = Locked nucleic acid with 5-methylcytidine base
  misc_feature 1: note = RNA
  misc_feature 2: note = DNA
  misc_feature 3..5: note = RNA
  misc_feature 6..9: note = DNA
  misc_feature 10: note = RNA
  misc_feature 11..14: note = DNA
  misc_feature 15..20: note = RNA
gcagaggtgaagcgaagtgc

SEQ ID NO: 346 - DNA, 20 bp, synthetic construct
  source 1..20: mol_type = other DNA
  modified_base 1: mod_base = OTHER; note = Locked nucleic acid with guanine base
  modified_base 2: mod_base = OTHER; note = Locked nucleic acid with 5-methylcytidine base
  modified_base 3: mod_base = OTHER; note = 2'-O-methoxyethyl adenosine
  modified_base 4: mod_base = OTHER; note = Locked nucleic acid with guanine base
  modified_base 5: mod_base = OTHER; note = 2'-O-methoxyethyl adenosine
  modified_base 10: mod_base = OTHER; note = 2'-O-methoxyethyl adenosine
  modified_base 13: mod_base = OTHER; note = 2'-deoxy 5-methylcytidine
  modified_base 17: mod_base = OTHER; note = 2'-O-methoxyethyl guanosine
  modified_base 18: mod_base = OTHER; note = 2'-O-methoxyethyl thymidine
  modified_base 19: mod_base = OTHER; note = 2'-O-methoxyethyl guanosine
  modified_base 20: mod_base = OTHER; note = 2'-O-methoxyethyl 5-methylcytidine
  misc_feature 1..5: note = RNA
  misc_feature 6..9: note = DNA
  misc_feature 10: note = RNA
  misc_feature 11..16: note = DNA
  misc_feature 17..20: note = RNA
gcagaggtgaagcgaagtgc

SEQ ID NO: 347 - DNA, 20 bp, synthetic construct
  source 1..20: mol_type = other DNA
  modified_base 1: mod_base = OTHER; note = Locked nucleic acid with guanine base
  modified_base 2: mod_base = OTHER; note = Locked nucleic acid with 5-methylcytidine base
  modified_base 3: mod_base = OTHER; note = 2'-O-methoxyethyl adenosine
  modified_base 4: mod_base = OTHER; note = Locked nucleic acid with guanine base
  modified_base 10: mod_base = OTHER; note = 2'-O-methoxyethyl adenosine
  modified_base 13: mod_base = OTHER; note = 2'-deoxy 5-methylcytidine
  modified_base 16: mod_base = OTHER; note = 2'-O-methoxyethyl adenosine
  modified_base 17: mod_base = OTHER; note = 2'-O-methoxyethyl guanosine
  modified_base 18: mod_base = OTHER; note = 2'-O-methoxyethyl thymidine
  modified_base 19: mod_base = OTHER; note = 2'-O-methoxyethyl guanosine
  modified_base 20: mod_base = OTHER; note = 2'-O-methoxyethyl 5-methylcytidine
  misc_feature 1..4: note = RNA
  misc_feature 5..9: note = DNA
  misc_feature 10: note = RNA
  misc_feature 11..15: note = DNA
  misc_feature 16..20: note = RNA
gcagaggtgaagcgaagtgc

SEQ ID NO: 348 - DNA, 20 bp, synthetic construct
  source 1..20: mol_type = other DNA
  modified_base 1: mod_base = OTHER; note = Locked nucleic acid with guanine base
  modified_base 2: mod_base = OTHER; note = Locked nucleic acid with 5-methylcytidine base
  modified_base 3: mod_base = OTHER; note = 2'-O-methoxyethyl adenosine
  modified_base 4: mod_base = OTHER; note = Locked nucleic acid with guanine base
  modified_base 10: mod_base = OTHER; note = 2'-O-methoxyethyl adenosine
  modified_base 13: mod_base = OTHER; note = 2'-deoxy 5-methylcytidine
  modified_base 17: mod_base = OTHER; note = 2'-O-methoxyethyl guanosine
  modified_base 18: mod_base = OTHER; note = 2'-O-methoxyethyl thymidine
  modified_base 19: mod_base = OTHER; note = 2'-O-methoxyethyl guanosine
  modified_base 20: mod_base = OTHER; note = 2'-O-methoxyethyl 5-methylcytidine
  misc_feature 1..4: note = RNA
  misc_feature 5..9: note = DNA
  misc_feature 10: note = RNA
  misc_feature 11..16: note = DNA
  misc_feature 17..20: note = RNA
gcagaggtgaagcgaagtgc

SEQ ID NO: 349 - DNA, 20 bp, synthetic construct
  source 1..20: mol_type = other DNA
  modified_base 1: mod_base = OTHER; note = Locked nucleic acid with guanine base
  modified_base 2: mod_base = OTHER; note = 2'-O-methoxyethyl 5-methylcytidine
  modified_base 3: mod_base = OTHER; note = Locked nucleic acid with adenine base
  modified_base 4: mod_base = OTHER; note = Locked nucleic acid with guanine base
  modified_base 5: mod_base = OTHER; note = 2'-O-methoxyethyl adenosine
  modified_base 10: mod_base = OTHER; note = 2'-O-methoxyethyl adenosine
  modified_base 13: mod_base = OTHER; note = 2'-deoxy 5-methylcytidine
  modified_base 17: mod_base = OTHER; note = 2'-O-methoxyethyl guanosine
  modified_base 18: mod_base = OTHER; note = 2'-O-methoxyethyl thymidine
  modified_base 19: mod_base = OTHER; note = 2'-O-methoxyethyl guanosine
  modified_base 20: mod_base = OTHER; note = 2'-O-methoxyethyl 5-methylcytidine
  misc_feature 1..5: note = RNA
  misc_feature 6..9: note = DNA
  misc_feature 10: note = RNA
  misc_feature 11..16: note = DNA
  misc_feature 17..20: note = RNA
gcagaggtgaagcgaagtgc

SEQ ID NO: 350 - DNA, 20 bp, synthetic construct
  source 1..20: mol_type = other DNA
  modified_base 1: mod_base = OTHER; note = Locked nucleic acid with guanine base
  modified_base 2: mod_base = OTHER; note = 2'-O-methoxyethyl 5-methylcytidine
  modified_base 3: mod_base = OTHER; note = Locked nucleic acid with adenine base
  modified_base 4: mod_base = OTHER; note = 2'-O-methoxyethyl guanosine
  modified_base 5: mod_base = OTHER; note = 2'-O-methoxyethyl adenosine
  modified_base 10: mod_base = OTHER; note = 2'-O-methoxyethyl adenosine
  modified_base 13: mod_base = OTHER; note = 2'-deoxy 5-methylcytidine
  modified_base 16: mod_base = OTHER; note = 2'-O-methoxyethyl adenosine
  modified_base 17: mod_base = OTHER; note = 2'-O-methoxyethyl guanosine
  modified_base 18: mod_base = OTHER; note = 2'-O-methoxyethyl uridine
  modified_base 19: mod_base = OTHER; note = 2'-O-methoxyethyl guanosine
  modified_base 20: mod_base = OTHER; note = 2'-O-methoxyethyl 5-methylcytidine
  misc_feature 1..5: note = RNA
  misc_feature 6..9: note = DNA
  misc_feature 10: note = RNA
  misc_feature 11..15: note = DNA
  misc_feature 16..20: note = RNA
gcagaggtgaagcgaagtgc

SEQ ID NO: 351 - DNA, 20 bp, synthetic construct
  source 1..20: mol_type = other DNA
  modified_base 1: mod_base = OTHER; note = Locked nucleic acid with guanine base
  modified_base 2: mod_base = OTHER; note = 2'-O-methoxyethyl 5-methylcytidine
  modified_base 3: mod_base = OTHER; note = Locked nucleic acid with adenine base
  modified_base 4: mod_base = OTHER; note = 2'-O-methoxyethyl guanosine
  modified_base 5: mod_base = OTHER; note = 2'-O-methoxyethyl adenosine
  modified_base 10: mod_base = OTHER; note = 2'-O-methyl adenosine
  modified_base 13: mod_base = OTHER; note = 2'-deoxy 5-methylcytidine
  modified_base 17: mod_base = OTHER; note = 2'-O-methoxyethyl guanosine
  modified_base 18: mod_base = OTHER; note = 2'-O-methoxyethyl uridine
  modified_base 19: mod_base = OTHER; note = 2'-O-methoxyethyl guanosine
  modified_base 20: mod_base = OTHER; note = 2'-O-methoxyethyl 5-methylcytidine
  misc_feature 1..5: note = RNA
  misc_feature 6..9: note = DNA
  misc_feature 10: note = RNA
  misc_feature 11..16: note = DNA
  misc_feature 17..20: note = RNA
gcagaggtgaagcgaagtgc

SEQ ID NO: 352 - DNA, 20 bp, synthetic construct
  source 1..20: mol_type = other DNA
  modified_base 1: mod_base = OTHER; note = Locked nucleic acid with guanine base
  modified_base 2: mod_base = OTHER; note = 2'-O-methoxyethyl 5-methylcytidine
  modified_base 3: mod_base = OTHER; note = Locked nucleic acid with adenine base
  modified_base 4: mod_base = OTHER; note = 2'-O-methoxyethyl guanosine
  modified_base 5: mod_base = OTHER; note = 2'-O-methoxyethyl adenosine
  modified_base 10: mod_base = OTHER; note = 2'-O-methyl adenosine
  modified_base 13: mod_base = OTHER; note = 2'-deoxy 5-methylcytidine
  modified_base 18: mod_base = OTHER; note = 2'-O-methoxyethyl uridine
  modified_base 19: mod_base = OTHER; note = Locked nucleic acid with guanine base
  modified_base 20: mod_base = OTHER; note = Locked nucleic acid with 5-methylcytidine base
  misc_feature 1..5: note = RNA
  misc_feature 6..9: note = DNA
  misc_feature 10: note = RNA
  misc_feature 11..17: note = DNA
  misc_feature 18..20: note = RNA
gcagaggtgaagcgaagtgc

SEQ ID NO: 353 - DNA, 20 bp, synthetic construct
  source 1..20: mol_type = other DNA
  modified_base 1: mod_base = OTHER; note = Locked nucleic acid with guanine base
  modified_base 2: mod_base = OTHER; note = 2'-O-methoxyethyl 5-methylcytidine
  modified_base 3: mod_base = OTHER; note = Locked nucleic acid with adenine base
  modified_base 4: mod_base = OTHER; note = 2'-O-methoxyethyl guanosine
  modified_base 5: mod_base = OTHER; note = 2'-O-methoxyethyl adenosine
  modified_base 10: mod_base = OTHER; note = 2'-O-methoxyethyl adenosine
  modified_base 13: mod_base = OTHER; note = 2'-deoxy 5-methylcytidine
  modified_base 17: mod_base = OTHER; note = 2'-O-methoxyethyl guanosine
  modified_base 18: mod_base = OTHER; note = 2'-O-methoxyethyl uridine
  modified_base 19: mod_base = OTHER; note = 2'-O-methoxyethyl guanosine
  modified_base 20: mod_base = OTHER; note = 2'-O-methoxyethyl 5-methylcytidine
  misc_feature 1..5: note = RNA
  misc_feature 6..9: note = DNA
  misc_feature 10: note = RNA
  misc_feature 11..16: note = DNA
  misc_feature 17..20: note = RNA
gcagaggtgaagcgaagtgc

SEQ ID NO: 354 - DNA, 20 bp, synthetic construct
  source 1..20: mol_type = other DNA
  modified_base 1: mod_base = OTHER; note = Locked nucleic acid with guanine base
  modified_base 2: mod_base = OTHER; note = 2'-O-methoxyethyl 5-methylcytidine
  modified_base 3: mod_base = OTHER; note = Locked nucleic acid with adenine base
  modified_base 4: mod_base = OTHER; note = 2'-O-methoxyethyl guanosine
  modified_base 5: mod_base = OTHER; note = 2'-O-methoxyethyl adenosine
  modified_base 10: mod_base = OTHER; note = 2'-O-methoxyethyl adenosine
  modified_base 13: mod_base = OTHER; note = 2'-deoxy 5-methylcytidine
  modified_base 18: mod_base = OTHER; note = 2'-O-methoxyethyl uridine
  modified_base 19: mod_base = OTHER; note = 2'-O-methoxyethyl guanosine
  modified_base 20: mod_base = OTHER; note = 2'-O-methoxyethyl 5-methylcytidine
  misc_feature 1..5: note = RNA
  misc_feature 6..9: note = DNA
  misc_feature 10: note = RNA
  misc_feature 11..17: note = DNA
  misc_feature 18..20: note = RNA
gcagaggtgaagcgaagtgc

SEQ ID NO: 355 - DNA, 20 bp, synthetic construct
  source 1..20: mol_type = other DNA
  modified_base 1: mod_base = OTHER; note = Locked nucleic acid with guanine base
  modified_base 2: mod_base = OTHER; note = 2'-O-methoxyethyl 5-methylcytidine
  modified_base 3: mod_base = OTHER; note = Locked nucleic acid with adenine base
  modified_base 4: mod_base = OTHER; note = 2'-O-methoxyethyl guanosine
  modified_base 5: mod_base = OTHER; note = 2'-O-methoxyethyl adenosine
  modified_base 10: mod_base = OTHER; note = 2'-O-methoxyethyl adenosine
  modified_base 13: mod_base = OTHER; note = 2'-deoxy 5-methylcytidine
  modified_base 18: mod_base = OTHER; note = 2'-O-methoxyethyl uridine
  modified_base 19: mod_base = OTHER; note = 2'-O-methoxyethyl guanosine
  modified_base 20: mod_base = OTHER; note = Locked nucleic acid with 5-methylcytidine base
  misc_feature 1..5: note = RNA
  misc_feature 6..9: note = DNA
  misc_feature 10: note = RNA
  misc_feature 11..17: note = DNA
  misc_feature 18..20: note = RNA
gcagaggtgaagcgaagtgc

SEQ ID NO: 356 - DNA, 20 bp, synthetic construct
  source 1..20: mol_type = other DNA
  modified_base 1: mod_base = OTHER; note = Locked nucleic acid with guanine base
  modified_base 2: mod_base = OTHER; note = 2'-O-methoxyethyl 5-methylcytidine
  modified_base 3: mod_base = OTHER; note = Locked nucleic acid with adenine base
  modified_base 4: mod_base = OTHER; note = 2'-O-methoxyethyl guanosine
  modified_base 5: mod_base = OTHER; note = 2'-O-methoxyethyl adenosine
  modified_base 10: mod_base = OTHER; note = 2'-O-methoxyethyl adenosine
  modified_base 13: mod_base = OTHER; note = 2'-deoxy 5-methylcytidine
  modified_base 18: mod_base = OTHER; note = 2'-O-methoxyethyl uridine
  modified_base 19: mod_base = OTHER; note = Locked nucleic acid with guanine base
  modified_base 20: mod_base = OTHER; note = Locked nucleic acid with 5-methylcytidine base
  misc_feature 1..5: note = RNA
  misc_feature 6..9: note = DNA
  misc_feature 10: note = RNA
  misc_feature 11..17: note = DNA
  misc_feature 18..20: note = RNA
gcagaggtgaagcgaagtgc

SEQ ID NO: 357 - DNA, 20 bp, synthetic construct
  source 1..20: mol_type = other DNA
  modified_base 1: mod_base = OTHER; note = Locked nucleic acid with guanine base
  modified_base 2: mod_base = OTHER; note = 2'-O-methoxyethyl 5-methylcytidine
  modified_base 3: mod_base = OTHER; note = Locked nucleic acid with adenine base
  modified_base 4: mod_base = OTHER; note = 2'-O-methoxyethyl guanosine
  modified_base 5: mod_base = OTHER; note = 2'-O-methoxyethyl adenosine
  modified_base 10: mod_base = OTHER; note = 2'-O-methoxyethyl adenosine
  modified_base 13: mod_base = OTHER; note = 2'-deoxy 5-methylcytidine
  modified_base 19: mod_base = OTHER; note = 2'-O-methoxyethyl guanosine
  modified_base 20: mod_base = OTHER; note = 2'-O-methoxyethyl 5-methylcytidine
  misc_feature 1..5: note = RNA
  misc_feature 6..9: note = DNA
  misc_feature 10: note = RNA
  misc_feature 11..18: note = DNA
  misc_feature 19..20: note = RNA
gcagaggtgaagcgaagtgc

SEQ ID NO: 358 - DNA, 20 bp, synthetic construct
  source 1..20: mol_type = other DNA
  modified_base 1: mod_base = OTHER; note = Locked nucleic acid with guanine base
  modified_base 2: mod_base = OTHER; note = 2'-O-methoxyethyl 5-methylcytidine
  modified_base 3: mod_base = OTHER; note = Locked nucleic acid with adenine base
  modified_base 4: mod_base = OTHER; note = 2'-O-methoxyethyl guanosine
  modified_base 5: mod_base = OTHER; note = 2'-O-methoxyethyl adenosine
  modified_base 10: mod_base = OTHER; note = 2'-O-methoxyethyl adenosine
  modified_base 13: mod_base = OTHER; note = 2'-deoxy 5-methylcytidine
  modified_base 19: mod_base = OTHER; note = Locked nucleic acid with guanine base
  modified_base 20: mod_base = OTHER; note = Locked nucleic acid with 5-methylcytidine base
  misc_feature 1..5: note = RNA
  misc_feature 6..9: note = DNA
  misc_feature 10: note = RNA
  misc_feature 11..18: note = DNA
  misc_feature 19..20: note = RNA
gcagaggtgaagcgaagtgc

SEQ ID NO: 359 - DNA, 20 bp, synthetic construct
  source 1..20: mol_type = other DNA
  modified_base 1: mod_base = OTHER; note = Locked nucleic acid with guanine base
  modified_base 2: mod_base = OTHER; note = Locked nucleic acid with 5-methylcytidine base
  modified_base 3: mod_base = OTHER; note = 2'-O-methoxyethyl adenosine
  modified_base 4: mod_base = OTHER; note = 2'-O-methoxyethyl guanosine
  modified_base 5: mod_base = OTHER; note = 2'-O-methoxyethyl adenosine
  modified_base 10: mod_base = OTHER; note = 2'-O-methoxyethyl adenosine
  modified_base 13: mod_base = OTHER; note = 2'-deoxy 5-methylcytidine
  modified_base 17: mod_base = OTHER; note = 2'-O-methoxyethyl guanosine
  modified_base 18: mod_base = OTHER; note = 2'-O-methoxyethyl uridine
  modified_base 19: mod_base = OTHER; note = 2'-O-methoxyethyl guanosine
  modified_base 20: mod_base = OTHER; note = 2'-O-methoxyethyl 5-methylcytidine
  misc_feature 1..5: note = RNA
  misc_feature 6..9: note = DNA
  misc_feature 10: note = RNA
  misc_feature 11..16: note = DNA
  misc_feature 17..20: note = RNA
gcagaggtgaagcgaagtgc

SEQ ID NO: 360 - DNA, 20 bp, synthetic construct
  source 1..20: mol_type = other DNA
  modified_base 1: mod_base = OTHER; note = Locked nucleic acid with guanine base
  modified_base 2: mod_base = OTHER; note = Locked nucleic acid with 5-methylcytidine base
  modified_base 3: mod_base = OTHER; note = 2'-O-methoxyethyl adenosine
  modified_base 4: mod_base = OTHER; note = 2'-O-methoxyethyl guanosine
  modified_base 5: mod_base = OTHER; note = 2'-O-methoxyethyl adenosine
  modified_base 10: mod_base = OTHER; note = 2'-O-methoxyethyl adenosine
  modified_base 13: mod_base = OTHER; note = 2'-deoxy 5-methylcytidine
  modified_base 18: mod_base = OTHER; note = 2'-O-methoxyethyl uridine
  modified_base 19: mod_base = OTHER; note = 2'-O-methoxyethyl guanosine
  modified_base 20: mod_base = OTHER; note = 2'-O-methoxyethyl 5-methylcytidine
  misc_feature 1..5: note = RNA
  misc_feature 6..9: note = DNA
  misc_feature 10: note = RNA
  misc_feature 11..17: note = DNA
  misc_feature 18..20: note = RNA
gcagaggtgaagcgaagtgc

SEQ ID NO: 361 - DNA, 20 bp, synthetic construct
  source 1..20: mol_type = other DNA
  modified_base 1: mod_base = OTHER; note = Locked nucleic acid with guanine base
  modified_base 2: mod_base = OTHER; note = Locked nucleic acid with 5-methylcytidine base
  modified_base 3: mod_base = OTHER; note = 2'-O-methoxyethyl adenosine
  modified_base 4: mod_base = OTHER; note = 2'-O-methoxyethyl guanosine
  modified_base 5: mod_base = OTHER; note = 2'-O-methoxyethyl adenosine
  modified_base 10: mod_base = OTHER; note = 2'-O-methoxyethyl adenosine
  modified_base 13: mod_base = OTHER; note = 2'-deoxy 5-methylcytidine
  modified_base 18: mod_base = OTHER; note = 2'-O-methoxyethyl uridine
  modified_base 19: mod_base = OTHER; note = 2'-O-methoxyethyl guanosine
  modified_base 20: mod_base = OTHER; note = Locked nucleic acid with 5-methylcytidine base
  misc_feature 1..5: note = RNA
  misc_feature 6..9: note = DNA
  misc_feature 10: note = RNA
  misc_feature 11..17: note = DNA
  misc_feature 18..20: note = RNA
gcagaggtgaagcgaagtgc

SEQ ID NO: 362 - DNA, 20 bp, synthetic construct
  source 1..20: mol_type = other DNA
  modified_base 1: mod_base = OTHER; note = Locked nucleic acid with guanine base
  modified_base 2: mod_base = OTHER; note = Locked nucleic acid with 5-methylcytidine base
  modified_base 3: mod_base = OTHER; note = 2'-O-methoxyethyl adenosine
  modified_base 4: mod_base = OTHER; note = 2'-O-methoxyethyl guanosine
  modified_base 5: mod_base = OTHER; note = 2'-O-methoxyethyl adenosine
  modified_base 10: mod_base = OTHER; note = 2'-O-methoxyethyl adenosine
  modified_base 13: mod_base = OTHER; note = 2'-deoxy 5-methylcytidine
  modified_base 18: mod_base = OTHER; note = 2'-O-methoxyethyl uridine
  modified_base 19: mod_base = OTHER; note = Locked nucleic acid with guanine base
  modified_base 20: mod_base = OTHER; note = Locked nucleic acid with 5-methylcytidine base
  misc_feature 1..5: note = RNA
  misc_feature 6..9: note = DNA
  misc_feature 10: note = RNA
  misc_feature 11..17: note = DNA
  misc_feature 18..20: note = RNA
gcagaggtgaagcgaagtgc

SEQ ID NO: 363 - DNA, 20 bp, synthetic construct
  source 1..20: mol_type = other DNA
  modified_base 1: mod_base = OTHER; note = Locked nucleic acid with guanine base
  modified_base 2: mod_base = OTHER; note = Locked nucleic acid with 5-methylcytidine base
  modified_base 3: mod_base = OTHER; note = 2'-O-methoxyethyl adenosine
  modified_base 4: mod_base = OTHER; note = 2'-O-methoxyethyl guanosine
  modified_base 5: mod_base = OTHER; note = 2'-O-methoxyethyl adenosine
  modified_base 10: mod_base = OTHER; note = 2'-O-methoxyethyl adenosine
  modified_base 13: mod_base = OTHER; note = 2'-deoxy 5-methylcytidine
  modified_base 19: mod_base = OTHER; note = Locked nucleic acid with guanine base
  modified_base 20: mod_base = OTHER; note = Locked nucleic acid with 5-methylcytidine base
  misc_feature 1..5: note = RNA
  misc_feature 6..9: note = DNA
  misc_feature 10: note = RNA
  misc_feature 11..18: note = DNA
  misc_feature 19..20: note = RNA
gcagaggtgaagcgaagtgc

SEQ ID NO: 364 - DNA, 20 bp, synthetic construct
  source 1..20: mol_type = other DNA
  modified_base 1: mod_base = OTHER; note = 2'-O-methoxyethyl guanosine
  modified_base 2: mod_base = OTHER; note = 2'-O-methoxyethyl 5-methylcytidine
  modified_base 3: mod_base = OTHER; note = 2'-O-methoxyethyl adenosine
  modified_base 4: mod_base = OTHER; note = 2'-O-methoxyethyl guanosine
  modified_base 5: mod_base = OTHER; note = 2'-O-methoxyethyl adenosine
  modified_base 10: mod_base = OTHER; note = 2'-O-methoxyethyl adenosine
  modified_base 13: mod_base = OTHER; note = 2'-deoxy 5-methylcytidine
  modified_base 18: mod_base = OTHER; note = 2'-O-methoxyethyl uridine
  modified_base 19: mod_base = OTHER; note = Locked nucleic acid with guanine base
  modified_base 20: mod_base = OTHER; note = Locked nucleic acid with 5-methylcytidine base
  misc_feature 1..5: note = RNA
  misc_feature 6..9: note = DNA
  misc_feature 10: note = RNA
  misc_feature 11..17: note = DNA
  misc_feature 18..20: note = RNA
gcagaggtgaagcgaagtgc

SEQ ID NO: 365 - DNA, 20 bp, synthetic construct
  source 1..20: mol_type = other DNA
  modified_base 1: mod_base = OTHER; note = 2'-O-methoxyethyl guanosine
  modified_base 2: mod_base = OTHER; note = 2'-deoxy 5-methylcytidine
  modified_base 3: mod_base = OTHER; note = Locked nucleic acid with adenine base
  modified_base 4: mod_base = OTHER; note = 2'-O-methoxyethyl guanosine
  modified_base 5: mod_base = OTHER; note = 2'-O-methoxyethyl adenosine
  modified_base 10: mod_base = OTHER; note = 2'-O-methoxyethyl adenosine
  modified_base 13: mod_base = OTHER; note = 2'-deoxy 5-methylcytidine
  modified_base 18: mod_base = OTHER; note = 2'-O-methoxyethyl uridine
  modified_base 19: mod_base = OTHER; note = Locked nucleic acid with guanine base
  modified_base 20: mod_base = OTHER; note = Locked nucleic acid with 5-methylcytidine base
  misc_feature 1: note = RNA
  misc_feature 2: note = DNA
  misc_feature 3..5: note = RNA
  misc_feature 6..9: note = DNA
  misc_feature 10: note = RNA
  misc_feature 11..17: note = DNA
  misc_feature 18..20: note = RNA
gcagaggtgaagcgaagtgc

SEQ ID NO: 366 - DNA, 20 bp, synthetic construct
  source 1..20: mol_type = other DNA
  modified_base 1: mod_base = OTHER; note = Locked nucleic acid with guanine base
  modified_base 2: mod_base = OTHER; note = 2'-deoxy 5-methylcytidine
  modified_base 3: mod_base = OTHER; note = Locked nucleic acid with adenine base
  modified_base 4: mod_base = OTHER; note = 2'-O-methoxyethyl guanosine
  modified_base 5: mod_base = OTHER; note = 2'-O-methoxyethyl adenosine
  modified_base 10: mod_base = OTHER; note = 2'-O-methoxyethyl adenosine
  modified_base 13: mod_base = OTHER; note = 2'-deoxy 5-methylcytidine
  modified_base 17: mod_base = OTHER; note = 2'-O-methoxyethyl guanosine
  modified_base 18: mod_base = OTHER; note = 2'-O-methoxyethyl uridine
  modified_base 19: mod_base = OTHER; note = 2'-O-methoxyethyl guanosine
  modified_base 20: mod_base = OTHER; note = 2'-O-methoxyethyl 5-methylcytidine
  misc_feature 1: note = RNA
  misc_feature 2: note = DNA
  misc_feature 3..5: note = RNA
  misc_feature 6..9: note = DNA
  misc_feature 10: note = RNA
  misc_feature 11..16: note = DNA
  misc_feature 17..20: note = RNA
gcagaggtgaagcgaagtgc

SEQ ID NO: 367 - DNA, 20 bp, synthetic construct
  source 1..20: mol_type = other DNA
  modified_base 1: mod_base = OTHER; note = Locked nucleic acid with guanine base
  modified_base 2: mod_base = OTHER; note = 2'-deoxy 5-methylcytidine
  modified_base 3: mod_base = OTHER; note = Locked nucleic acid with adenine base
  modified_base 4: mod_base = OTHER; note = 2'-O-methoxyethyl guanosine
  modified_base 5: mod_base = OTHER; note = 2'-O-methoxyethyl adenosine
  modified_base 10: mod_base = OTHER; note = 2'-O-methoxyethyl adenosine
  modified_base 13: mod_base = OTHER; note = 2'-deoxy 5-methylcytidine
  modified_base 18: mod_base = OTHER; note = 2'-O-methoxyethyl uridine
  modified_base 19: mod_base = OTHER; note = 2'-O-methoxyethyl guanosine
  modified_base 20: mod_base = OTHER; note = 2'-O-methoxyethyl 5-methylcytidine
  misc_feature 1: note = RNA
  misc_feature 2: note = DNA
  misc_feature 3..5: note = RNA
  misc_feature 6..9: note = DNA
  misc_feature 10: note = RNA
  misc_feature 11..17: note = DNA
  misc_feature 18..20: note = RNA
gcagaggtgaagcgaagtgc

SEQ ID NO: 368 - DNA, 20 bp, synthetic construct
  source 1..20: mol_type = other DNA
  modified_base 1: mod_base = OTHER; note = Locked nucleic acid with guanine base
  modified_base 2: mod_base = OTHER; note = 2'-deoxy 5-methylcytidine
  modified_base 3: mod_base = OTHER; note = Locked nucleic acid with adenine base
  modified_base 4: mod_base = OTHER; note = 2'-O-methoxyethyl guanosine
  modified_base 5: mod_base = OTHER; note = 2'-O-methoxyethyl adenosine
  modified_base 10: mod_base = OTHER; note = 2'-O-methoxyethyl adenosine
  modified_base 13: mod_base = OTHER; note = 2'-deoxy 5-methylcytidine
  modified_base 18: mod_base = OTHER; note = 2'-O-methoxyethyl uridine
  modified_base 19: mod_base = OTHER; note = 2'-O-methoxyethyl guanosine
  modified_base 20: mod_base = OTHER; note = Locked nucleic acid with 5-methylcytidine base
  misc_feature 1: note = RNA
  misc_feature 2: note = DNA
  misc_feature 3..5: note = RNA
  misc_feature 6..9: note = DNA
  misc_feature 10: note = RNA
  misc_feature 11..17: note = DNA
  misc_feature 18..20: note = RNA
gcagaggtgaagcgaagtgc

SEQ ID NO: 369 - DNA, 20 bp, synthetic construct
  source 1..20: mol_type = other DNA
  modified_base 1: mod_base = OTHER; note = Locked nucleic acid with guanine base
  modified_base 2: mod_base = OTHER; note = 2'-deoxy 5-methylcytidine
  modified_base 3: mod_base = OTHER; note = Locked nucleic acid with adenine base
  modified_base 4: mod_base = OTHER; note = 2'-O-methoxyethyl guanosine
  modified_base 5: mod_base = OTHER; note = 2'-O-methoxyethyl adenosine
  modified_base 10: mod_base = OTHER; note = 2'-O-methoxyethyl adenosine
  modified_base 13: mod_base = OTHER; note = 2'-deoxy 5-methylcytidine
  modified_base 18: mod_base = OTHER; note = 2'-O-methoxyethyl uridine
  modified_base 19: mod_base = OTHER; note = Locked nucleic acid with guanine base
  modified_base 20: mod_base = OTHER; note = Locked nucleic acid with 5-methylcytidine base
  misc_feature 1: note = RNA
  misc_feature 2: note = DNA
  misc_feature 3..5: note = RNA
  misc_feature 6..9: note = DNA
  misc_feature 10: note = RNA
  misc_feature 11..17: note = DNA
  misc_feature 18..20: note = RNA
gcagaggtgaagcgaagtgc

SEQ ID NO: 370 - DNA, 20 bp, synthetic construct
  source 1..20: mol_type = other DNA
  modified_base 1: mod_base = OTHER; note = 2'-O-methoxyethyl guanosine
  modified_base 2: mod_base = OTHER; note = 2'-deoxy 5-methylcytidine
  modified_base 3: mod_base = OTHER; note = Locked nucleic acid with adenine base
  modified_base 4: mod_base = OTHER; note = Locked nucleic acid with guanine base
  modified_base 5: mod_base = OTHER; note = 2'-O-methoxyethyl adenosine
  modified_base 10: mod_base = OTHER; note = 2'-O-methoxyethyl adenosine
  modified_base 13: mod_base = OTHER; note = 2'-deoxy 5-methylcytidine
  modified_base 18: mod_base = OTHER; note = 2'-O-methoxyethyl uridine
  modified_base 19: mod_base = OTHER; note = Locked nucleic acid with guanine base
  modified_base 20: mod_base = OTHER; note = Locked nucleic acid with 5-methylcytidine base
  misc_feature 1: note = RNA
  misc_feature 2: note = DNA
  misc_feature 3..5: note = RNA
  misc_feature 6..9: note = DNA
  misc_feature 10: note = RNA
  misc_feature 11..17: note = DNA
  misc_feature 18..20: note = RNA
gcagaggtgaagcgaagtgc

SEQ ID NO: 371 - DNA, 20 bp, synthetic construct
  source 1..20: mol_type = other DNA
  modified_base 1: mod_base = OTHER; note = 2'-O-methoxyethyl guanosine
  modified_base 2: mod_base = OTHER; note = Locked nucleic acid with 5-methylcytidine base
  modified_base 3: mod_base = OTHER; note = Locked nucleic acid with adenine base
  modified_base 4: mod_base = OTHER; note = 2'-O-methoxyethyl guanosine
  modified_base 5: mod_base = OTHER; note = 2'-O-methoxyethyl adenosine
  modified_base 10: mod_base = OTHER; note = 2'-O-methoxyethyl adenosine
  modified_base 13: mod_base = OTHER; note = 2'-deoxy 5-methylcytidine
  modified_base 18: mod_base = OTHER; note = 2'-O-methoxyethyl uridine
  modified_base 19: mod_base = OTHER; note = Locked nucleic acid with guanine base
  modified_base 20: mod_base = OTHER; note = Locked nucleic acid with 5-methylcytidine base
  misc_feature 1..5: note = RNA
  misc_feature 6..9: note = DNA
  misc_feature 10: note = RNA
  misc_feature 11..17: note = DNA
  misc_feature 18..20: note = RNA
gcagaggtgaagcgaagtgc

SEQ ID NO: 372 - DNA, 20 bp, synthetic construct
  source 1..20: mol_type = other DNA
  modified_base 1: mod_base = OTHER; note = Locked nucleic acid with guanine base
  modified_base 2: mod_base = OTHER; note = Locked nucleic acid with 5-methylcytidine base
  modified_base 3: mod_base = OTHER; note = 2'-O-methoxyethyl adenosine
  modified_base 4: mod_base = OTHER; note = Locked nucleic acid with guanine base
  modified_base 5: mod_base = OTHER; note = 2'-O-methoxyethyl adenosine
  modified_base 10: mod_base = OTHER; note = 2'-O-methoxyethyl adenosine
  modified_base 13: mod_base = OTHER; note = 2'-deoxy 5-methylcytidine
  modified_base 17: mod_base = OTHER; note = 2'-O-methoxyethyl guanosine
  modified_base 18: mod_base = OTHER; note = 2'-O-methoxyethyl uridine
  modified_base 19: mod_base = OTHER; note = 2'-O-methoxyethyl guanosine
  modified_base 20: mod_base = OTHER; note = 2'-O-methoxyethyl 5-methylcytidine
  misc_feature 1..5: note = RNA
  misc_feature 6..9: note = DNA
  misc_feature 10: note = RNA
  misc_feature 11..16: note = DNA
  misc_feature 17..20: note = RNA
gcagaggtgaagcgaagtgc

SEQ ID NO: 373 - DNA, 20 bp, synthetic construct
  source 1..20: mol_type = other DNA
  modified_base 1: mod_base = OTHER; note = Locked nucleic acid with guanine base
  modified_base 2: mod_base = OTHER; note = Locked nucleic acid with 5-methylcytidine base
  modified_base 3: mod_base = OTHER; note = 2'-O-methoxyethyl adenosine
  modified_base 4: mod_base = OTHER; note = Locked nucleic acid with guanine base
  modified_base 5: mod_base = OTHER; note = 2'-O-methoxyethyl adenosine
  modified_base 10: mod_base = OTHER; note = 2'-O-methoxyethyl adenosine
  modified_base 13: mod_base = OTHER; note = 2'-deoxy 5-methylcytidine
  modified_base 18: mod_base = OTHER; note = 2'-O-methoxyethyl uridine
  modified_base 19: mod_base = OTHER; note = 2'-O-methoxyethyl guanosine
  modified_base 20: mod_base = OTHER; note = 2'-O-methoxyethyl 5-methylcytidine
  misc_feature 1..5: note = RNA
  misc_feature 6..9: note = DNA
  misc_feature 10: note = RNA
  misc_feature 11..17: note = DNA
  misc_feature 18..20: note = RNA
gcagaggtgaagcgaagtgc

SEQ ID NO: 374 - DNA, 20 bp, synthetic construct
  source 1..20: mol_type = other DNA
  modified_base 1: mod_base = OTHER; note = Locked nucleic acid with guanine base
  modified_base 2: mod_base = OTHER; note = Locked nucleic acid with 5-methylcytidine base
  modified_base 3: mod_base = OTHER; note = 2'-O-methoxyethyl adenosine
  modified_base 4: mod_base = OTHER; note = Locked nucleic acid with guanine base
  modified_base 5: mod_base = OTHER; note = 2'-O-methoxyethyl adenosine
  modified_base 10: mod_base = OTHER; note = 2'-O-methoxyethyl adenosine
  modified_base 13: mod_base = OTHER; note = 2'-deoxy 5-methylcytidine
  modified_base 18: mod_base = OTHER; note = 2'-O-methoxyethyl uridine
  modified_base 19: mod_base = OTHER; note = 2'-O-methoxyethyl guanosine
  modified_base 20: mod_base = OTHER; note = Locked nucleic acid with 5-methylcytidine base
  misc_feature 1..5: note = RNA
  misc_feature 6..9: note = DNA
  misc_feature 10: note = RNA
  misc_feature 11..17: note = DNA
  misc_feature 18..20: note = RNA
gcagaggtgaagcgaagtgc

SEQ ID NO: 375 - DNA, 20 bp, synthetic construct
  source 1..20: mol_type = other DNA
  modified_base 1: mod_base = OTHER; note = Locked nucleic acid with guanine base
  modified_base 2: mod_base = OTHER; note = Locked nucleic acid with 5-methylcytidine base
  modified_base 3: mod_base = OTHER; note = 2'-O-methoxyethyl adenosine
  modified_base 4: mod_base = OTHER; note = Locked nucleic acid with guanine base
  modified_base 5: mod_base = OTHER; note = 2'-O-methoxyethyl adenosine
  modified_base 10: mod_base = OTHER; note = 2'-O-methoxyethyl adenosine
  modified_base 13: mod_base = OTHER; note = 2'-deoxy 5-methylcytidine
  modified_base 19: mod_base = OTHER; note = 2'-O-methoxyethyl guanosine
  modified_base 20: mod_base = OTHER; note = Locked nucleic acid with 5-methylcytidine base
  misc_feature 1..5: note = RNA
  misc_feature 6..9: note = DNA
  misc_feature 10: note = RNA
  misc_feature 11..18: note = DNA
  misc_feature 19..20: note = RNA
gcagaggtgaagcgaagtgc

SEQ ID NO: 376 - DNA, 20 bp, synthetic construct
  source 1..20: mol_type = other DNA
  modified_base 1: mod_base = OTHER; note = Locked nucleic acid with guanine base
  modified_base 2: mod_base = OTHER; note = Locked nucleic acid with 5-methylcytidine base
  modified_base 3: mod_base = OTHER; note = 2'-O-methoxyethyl adenosine
  modified_base 4: mod_base = OTHER; note = Locked nucleic acid with guanine base
  modified_base 5: mod_base = OTHER; note = 2'-O-methoxyethyl adenosine
  modified_base 10: mod_base = OTHER; note = 2'-O-methyl adenosine
  modified_base 13: mod_base = OTHER; note = 2'-deoxy 5-methylcytidine
  modified_base 18: mod_base = OTHER; note = 2'-O-methoxyethyl uridine
  modified_base 19: mod_base = OTHER; note = 2'-O-methoxyethyl guanosine
  modified_base 20: mod_base = OTHER; note = 2'-O-methoxyethyl 5-methylcytidine
  misc_feature 1..5: note = RNA
  misc_feature 6..9: note = DNA
  misc_feature 10: note = RNA
  misc_feature 11..17: note = DNA
  misc_feature 18..20: note = RNA
gcagaggtgaagcgaagtgc

SEQ ID NO: 377 - DNA, 20 bp, synthetic construct
  source 1..20: mol_type = other DNA
  modified_base 1: mod_base = OTHER; note = Locked nucleic acid with guanine base
  modified_base 2: mod_base = OTHER; note = Locked nucleic acid with 5-methylcytidine base
  modified_base 3: mod_base = OTHER; note = 2'-O-methoxyethyl adenosine
  modified_base 4: mod_base = OTHER; note = Locked nucleic acid with guanine base
  modified_base 5: mod_base = OTHER; note = 2'-O-methoxyethyl adenosine
  modified_base 10: mod_base = OTHER; note = 2'-O-methyl adenosine
  modified_base 13: mod_base = OTHER; note = 2'-deoxy 5-methylcytidine
  modified_base 18: mod_base = OTHER; note = 2'-O-methoxyethyl uridine
  modified_base 19: mod_base = OTHER; note = 2'-O-methoxyethyl guanosine
  modified_base 20: mod_base = OTHER; note = Locked nucleic acid with 5-methylcytidine base
  misc_feature 1..5: note = RNA
  misc_feature 6..9: note = DNA
  misc_feature 10: note = RNA
  misc_feature 11..17: note = DNA
  misc_feature 18..20: note = RNA
gcagaggtgaagcgaagtgc

SEQ ID NO: 378 - DNA, 20 bp, synthetic construct
  source 1..20: mol_type = other DNA
  modified_base 1: mod_base = OTHER; note = Locked nucleic acid with guanine base
  modified_base 2: mod_base = OTHER; note = 2'-deoxy 5-methylcytidine
  modified_base 3: mod_base = OTHER; note = Locked nucleic acid with adenine base
  modified_base 4: mod_base = OTHER; note = Locked nucleic acid with guanine base
  modified_base 5: mod_base = OTHER; note = 2'-O-methoxyethyl adenosine
  modified_base 10: mod_base = OTHER; note = 2'-O-methoxyethyl adenosine
  modified_base 13: mod_base = OTHER; note = 2'-deoxy 5-methylcytidine
  modified_base 17: mod_base = OTHER; note = 2'-O-methoxyethyl guanosine
  modified_base 18: mod_base = OTHER; note = 2'-O-methoxyethyl uridine
  modified_base 19: mod_base = OTHER; note = 2'-O-methoxyethyl guanosine
  modified_base 20: mod_base = OTHER; note = 2'-O-methoxyethyl 5-methylcytidine
  misc_feature 1: note = RNA
  misc_feature 2: note = DNA
  misc_feature 3..5: note = RNA
  misc_feature 6..9: note = DNA
  misc_feature 10: note = RNA
  misc_feature 11..16: note = DNA
  misc_feature 17..20: note = RNA
gcagaggtgaagcgaagtgc

SEQ ID NO: 379 - DNA, 20 bp, synthetic construct
  source 1..20: mol_type = other DNA
  modified_base 1: mod_base = OTHER; note = Locked nucleic acid with guanine base
  modified_base 2: mod_base = OTHER; note = 2'-deoxy 5-methylcytidine
  modified_base 3: mod_base = OTHER; note = Locked nucleic acid with adenine base
  modified_base 4: mod_base = OTHER; note = Locked nucleic acid with guanine base
  modified_base 5: mod_base = OTHER; note = 2'-O-methoxyethyl adenosine
  modified_base 10: mod_base = OTHER; note = 2'-O-methoxyethyl adenosine
  modified_base 13: mod_base = OTHER; note = 2'-deoxy 5-methylcytidine
  modified_base 18: mod_base = OTHER; note = 2'-O-methoxyethyl uridine
  modified_base 19: mod_base = OTHER; note = 2'-O-methoxyethyl guanosine
  modified_base 20: mod_base = OTHER; note = 2'-O-methoxyethyl 5-methylcytidine
  misc_feature 1: note = RNA
  misc_feature 2: note = DNA
  misc_feature 3..5: note = RNA
  misc_feature 6..9: note = DNA
  misc_feature 10: note = RNA
  misc_feature 11..17: note = DNA
  misc_feature 18..20: note = RNA
gcagaggtgaagcgaagtgc

SEQ ID NO: 380 - DNA, 20 bp, synthetic construct
  source 1..20: mol_type = other DNA
  modified_base 1: mod_base = OTHER; note = Locked nucleic acid with guanine base
  modified_base 2: mod_base = OTHER; note = 2'-deoxy 5-methylcytidine
  modified_base 3: mod_base = OTHER; note = Locked nucleic acid with adenine base
  modified_base 4: mod_base = OTHER; note = Locked nucleic acid with guanine base
  modified_base 5: mod_base = OTHER; note = 2'-O-methoxyethyl adenosine
  modified_base 10: mod_base = OTHER; note = 2'-O-methoxyethyl adenosine
  modified_base 13: mod_base = OTHER; note = 2'-deoxy 5-methylcytidine
  modified_base 19: mod_base = OTHER; note = 2'-O-methoxyethyl guanosine
  modified_base 20: mod_base = OTHER; note = Locked nucleic acid with 5-methylcytidine base
  misc_feature 1: note = RNA
  misc_feature 2: note = DNA
  misc_feature 3..5: note = RNA
  misc_feature 6..9: note = DNA
  misc_feature 10: note = RNA
  misc_feature 11..18: note = DNA
  misc_feature 19..20: note = RNA
gcagaggtgaagcgaagtgc

SEQ ID NO: 381 - DNA, 16 bp, synthetic construct
  source 1..16: mol_type = other DNA
  modified_base 1: mod_base = OTHER; note = 2'-O-methoxyethyl guanosine
  modified_base 2: mod_base = OTHER; note = 2'-O-methoxyethyl thymidine
  modified_base 3: mod_base = OTHER; note = 2'-O-methoxyethyl 5-methylcytidine
  modified_base 8: mod_base = OTHER; note = 2'-deoxy 5-methylcytidine
  modified_base 11: mod_base = OTHER; note = 2'-deoxy 5-methylcytidine
  modified_base 13: mod_base = OTHER; note = 2'-deoxy 5-methylcytidine
  modified_base 14: mod_base = OTHER; note = 2'-O-methoxyethyl thymidine
  modified_base 15: mod_base = OTHER; note = 2'-O-methoxyethyl 5-methylcytidine
  modified_base 16: mod_base = OTHER; note = 2'-O-methoxyethyl 5-methylcytidine
  misc_feature 1..3: note = RNA
  misc_feature 4..13: note = DNA
  misc_feature 14..16: note = RNA
gtctgtgcatctctcc

SEQ ID NO: 382 - DNA, 16 bp, synthetic construct
  source 1..16: mol_type = other DNA
  modified_base 1: mod_base = OTHER; note = Locked nucleic acid with guanine base
  modified_base 2: mod_base = OTHER; note = Locked nucleic acid with thymine base
  modified_base 3: mod_base = OTHER; note = Locked nucleic acid with 5-methylcytidine base
  modified_base 8: mod_base = OTHER; note = 2'-deoxy 5-methylcytidine
  modified_base 11: mod_base = OTHER; note = 2'-deoxy 5-methylcytidine
  modified_base 13: mod_base = OTHER; note = 2'-deoxy 5-methylcytidine
  modified_base 14: mod_base = OTHER; note = Locked nucleic acid with thymine base
  modified_base 15: mod_base = OTHER; note = Locked nucleic acid with 5-methylcytidine base
  modified_base 16: mod_base = OTHER; note = Locked nucleic acid with 5-methylcytidine base
  misc_feature 1..3: note = RNA
  misc_feature 4..13: note = DNA
  misc_feature 14..16: note = RNA
gtctgtgcatctctcc

SEQ ID NO: 383 - DNA, 18 bp, synthetic construct
  source 1..18: mol_type = other DNA
  modified_base 1: mod_base = OTHER; note = 2'-O-methoxyethyl guanosine
  modified_base 2: mod_base = OTHER; note = 2'-O-methoxyethyl 5-methylcytidine
  modified_base 4: mod_base = OTHER; note = 2'-deoxy 5-methylcytidine
  modified_base 8: mod_base = OTHER; note = 2'-deoxy 5-methylcytidine
  modified_base 10: mod_base = OTHER; note = 2'-deoxy 5-methylcytidine
  modified_base 16: mod_base = OTHER; note = 2'-deoxy 5-methylcytidine
  modified_base 17: mod_base = OTHER; note = 2'-O-methoxyethyl 5-methylcytidine
  modified_base 18: mod_base = OTHER; note = 2'-O-methoxyethyl adenosine
  misc_feature 1..2: note = RNA
  misc_feature 3..16: note = DNA
  misc_feature 17..18: note = RNA
gctcatactcgtaggcca

SEQ ID NO: 384 - DNA, 18 bp, synthetic construct
  source 1..18: mol_type = other DNA
  modified_base 1: mod_base = OTHER; note = Locked nucleic acid with guanine base
  modified_base 2: mod_base = OTHER; note = Locked nucleic acid with 5-methylcytidine base
  modified_base 4: mod_base = OTHER; note = 2'-deoxy 5-methylcytidine
  modified_base 8: mod_base = OTHER; note = 2'-deoxy 5-methylcytidine
  modified_base 10: mod_base = OTHER; note = 2'-deoxy 5-methylcytidine
  modified_base 16: mod_base = OTHER; note = 2'-deoxy 5-methylcytidine
  modified_base 17: mod_base = OTHER; note = Locked nucleic acid with 5-methylcytidine base
  modified_base 18: mod_base = OTHER; note = Locked nucleic acid with adenine base
  misc_feature 1..2: note = RNA
  misc_feature 3..16: note = DNA
  misc_feature 17..18: note = RNA
gctcatactcgtaggcca

SEQ ID NO: 385 - DNA, 20 bp, synthetic construct
  source 1..20: mol_type = other DNA
  modified_base 1: mod_base = OTHER; note = 2'-O-methoxyethyl guanosine
  modified_base 2: mod_base = OTHER; note = 2'-O-methoxyethyl 5-methylcytidine
  modified_base 3: mod_base = OTHER; note = 2'-O-methoxyethyl adenosine
  modified_base 4: mod_base = OTHER; note = 2'-O-methoxyethyl guanosine
  modified_base 5: mod_base = OTHER; note = 2'-O-methoxyethyl adenosine
  modified_base 10: mod_base = OTHER; note = 2'-O-methoxyethyl adenosine
  modified_base 13: mod_base = OTHER; note = 2'-deoxy 5-methylcytidine
  modified_base 16: mod_base = OTHER; note = 2'-O-methoxyethyl adenosine
  modified_base 17: mod_base = OTHER; note = 2'-O-methoxyethyl guanosine
  modified_base 18: mod_base = OTHER; note = 2'-O-methoxyethyl thymidine
  modified_base 19: mod_base = OTHER; note = Locked nucleic acid with guanine base
  modified_base 20: mod_base = OTHER; note = Locked nucleic acid with 5-methylcytidine base
  misc_feature 1..5: note = RNA
  misc_feature 6..9: note = DNA
  misc_feature 10: note = RNA
  misc_feature 11..15: note = DNA
  misc_feature 16..20: note = RNA
gcagaggtgaagcgaagtgc

SEQ ID NO: 386 - DNA, 20 bp, synthetic construct
  source 1..20: mol_type = other DNA
  modified_base 1: mod_base = OTHER; note = 2'-O-methoxyethyl guanosine
  modified_base 2: mod_base = OTHER; note = 2'-O-methoxyethyl 5-methylcytidine
  modified_base 3: mod_base = OTHER; note = 2'-O-methoxyethyl adenosine
  modified_base 4: mod_base = OTHER; note = 2'-O-methoxyethyl guanosine
  modified_base 5: mod_base = OTHER; note = 2'-O-methoxyethyl adenosine
  modified_base 10: mod_base = OTHER; note = 2'-O-methoxyethyl adenosine
  modified_base 13: mod_base = OTHER; note = 2'-deoxy 5-methylcytidine
  modified_base 16: mod_base = OTHER; note = 2'-O-methoxyethyl adenosine
  modified_base 17: mod_base = OTHER; note = 2'-O-methoxyethyl guanosine
  modified_base 18: mod_base = OTHER; note = Locked nucleic acid with thymine base
  modified_base 19: mod_base = OTHER; note = 2'-O-methoxyethyl guanosine
  modified_base 20: mod_base = OTHER; note = Locked nucleic acid with 5-methylcytidine base
  misc_feature 1..5: note = RNA
  misc_feature 6..9: note = DNA
  misc_feature 10: note = RNA
  misc_feature 11..15: note = DNA
  misc_feature 16..20: note = RNA
gcagaggtgaagcgaagtgc

SEQ ID NO: 387 - DNA, 20 bp, synthetic construct
  source 1..20: mol_type = other DNA
  modified_base 1: mod_base = OTHER; note = 2'-O-methoxyethyl guanosine
  modified_base 2: mod_base = OTHER; note = 2'-O-methoxyethyl 5-methylcytidine
  modified_base 3: mod_base = OTHER; note = 2'-O-methoxyethyl adenosine
  modified_base 4: mod_base = OTHER; note = 2'-O-methoxyethyl guanosine
  modified_base 5: mod_base = OTHER; note = 2'-O-methoxyethyl adenosine
  modified_base 10: mod_base = OTHER; note = 2'-O-methoxyethyl adenosine
  modified_base 13: mod_base = OTHER; note = 2'-deoxy 5-methylcytidine
  modified_base 16: mod_base = OTHER; note = 2'-O-methoxyethyl adenosine
  modified_base 17: mod_base = OTHER; note = Locked nucleic acid with guanine base
  modified_base 18: mod_base = OTHER; note = 2'-O-methoxyethyl thymidine
  modified_base 19: mod_base = OTHER; note = 2'-O-methoxyethyl guanosine
  modified_base 20: mod_base = OTHER; note = Locked nucleic acid with 5-methylcytidine base
  misc_feature 1..5: note = RNA
  misc_feature 6..9: note = DNA
  misc_feature 10: note = RNA
  misc_feature 11..15: note = DNA
  misc_feature 16..20: note = RNA
gcagaggtgaagcgaagtgc

SEQ ID NO: 388 - DNA, 20 bp, synthetic construct
  source 1..20: mol_type = other DNA
  modified_base 1: mod_base = OTHER; note = 2'-O-methoxyethyl guanosine
  modified_base 2: mod_base = OTHER; note = 2'-O-methoxyethyl 5-methylcytidine
  modified_base 3: mod_base = OTHER; note = 2'-O-methoxyethyl adenosine
  modified_base 4: mod_base = OTHER; note = 2'-O-methoxyethyl guanosine
  modified_base 5: mod_base = OTHER; note = 2'-O-methoxyethyl adenosine
  modified_base 10: mod_base = OTHER; note = 2'-O-methoxyethyl adenosine
  modified_base 13: mod_base = OTHER; note = 2'-deoxy 5-methylcytidine
  modified_base 16: mod_base = OTHER; note = 2'-O-methoxyethyl adenosine
  modified_base 17: mod_base = OTHER; note = 2'-O-methoxyethyl guanosine
  modified_base 18: mod_base = OTHER; note = Locked nucleic acid with thymine base
  modified_base 19: mod_base = OTHER; note = Locked nucleic acid with guanine base
  modified_base 20: mod_base = OTHER; note = 2'-O-methoxyethyl 5-methylcytidine
  misc_feature 1..5: note = RNA
  misc_feature 6..9: note = DNA
  misc_feature 10: note = RNA
  misc_feature 11..15: note = DNA
  misc_feature 16..20: note = RNA
gcagaggtgaagcgaagtgc

SEQ ID NO: 389 - DNA, 20 bp, synthetic construct
  source 1..20: mol_type = other DNA
  modified_base 1: mod_base = OTHER; note = 2'-O-methoxyethyl guanosine
  modified_base 2: mod_base = OTHER; note = 2'-O-methoxyethyl 5-methylcytidine
  modified_base 3: mod_base = OTHER; note = 2'-O-methoxyethyl adenosine
  modified_base 4: mod_base = OTHER; note = 2'-O-methoxyethyl guanosine
  modified_base 5: mod_base = OTHER; note = 2'-O-methoxyethyl adenosine
  modified_base 10: mod_base = OTHER; note = 2'-O-methoxyethyl adenosine
  modified_base 13: mod_base = OTHER; note = 2'-deoxy 5-methylcytidine
  modified_base 16: mod_base = OTHER; note = 2'-O-methoxyethyl adenosine
  modified_base 17: mod_base = OTHER; note = Locked nucleic acid with guanine base
  modified_base 18: mod_base = OTHER; note = 2'-O-methoxyethyl thymidine
  modified_base 19: mod_base = OTHER; note = Locked nucleic acid with guanine base
  modified_base 20: mod_base = OTHER; note = 2'-O-methoxyethyl 5-methylcytidine
  misc_feature 1..5: note = RNA
  misc_feature 6..9: note = DNA
  misc_feature 10: note = RNA
  misc_feature 11..15: note = DNA
  misc_feature 16..20: note = RNA
gcagaggtgaagcgaagtgc

SEQ ID NO: 390 - DNA, 20 bp, synthetic construct
  source 1..20: mol_type = other DNA
  modified_base 1: mod_base = OTHER; note = 2'-O-methoxyethyl guanosine
  modified_base 2: mod_base = OTHER; note = 2'-O-methoxyethyl 5-methylcytidine
  modified_base 3: mod_base = OTHER; note = 2'-O-methoxyethyl adenosine
  modified_base 4: mod_base = OTHER; note = 2'-O-methoxyethyl guanosine
  modified_base 5: mod_base = OTHER; note = 2'-O-methoxyethyl adenosine
  modified_base 10: mod_base = OTHER; note = 2'-O-methoxyethyl adenosine
  modified_base 13: mod_base = OTHER; note = 2'-deoxy 5-methylcytidine
  modified_base 16: mod_base = OTHER; note = 2'-O-methoxyethyl adenosine
  modified_base 17: mod_base = OTHER; note = Locked nucleic acid with guanine base
  modified_base 18: mod_base = OTHER; note = Locked nucleic acid with thymine base
  modified_base 19: mod_base = OTHER; note = 2'-O-methoxyethyl guanosine
  modified_base 20: mod_base = OTHER; note = 2'-O-methoxyethyl 5-methylcytidine
  misc_feature 1..5: note = RNA
  misc_feature 6..9: note = DNA
  misc_feature 10: note = RNA
  misc_feature 11..15: note = DNA
  misc_feature 16..20: note = RNA
gcagaggtgaagcgaagtgc

SEQ ID NO: 391 - DNA, 20 bp, synthetic construct
  source 1..20: mol_type = other DNA
  modified_base 1: mod_base = OTHER; note = 2'-O-methoxyethyl guanosine
  modified_base 2: mod_base = OTHER; note = 2'-O-methoxyethyl 5-methylcytidine
  modified_base 3: mod_base = OTHER; note = 2'-O-methoxyethyl adenosine
  modified_base 4: mod_base = OTHER; note = 2'-O-methoxyethyl guanosine
  modified_base 5: mod_base = OTHER; note = 2'-O-methoxyethyl adenosine
  modified_base 10: mod_base = OTHER; note = 2'-O-methyl adenosine
  modified_base 13: mod_base = OTHER; note = 2'-deoxy 5-methylcytidine
  modified_base 16: mod_base = OTHER; note = 2'-O-methoxyethyl adenosine
  modified_base 17: mod_base = OTHER; note = 2'-O-methoxyethyl guanosine
  modified_base 18: mod_base = OTHER; note = 2'-O-methoxyethyl thymidine
  modified_base 19: mod_base = OTHER; note = Locked nucleic acid with guanine base
  modified_base 20: mod_base = OTHER; note = Locked nucleic acid with 5-methylcytidine base
  misc_feature 1..5: note = RNA
  misc_feature 6..9: note = DNA
  misc_feature 10: note = RNA
  misc_feature 11..15: note = DNA
  misc_feature 16..20: note = RNA
gcagaggtgaagcgaagtgc

SEQ ID NO: 392 - DNA, 20 bp, synthetic construct
  source 1..20: mol_type = other DNA
  modified_base 1: mod_base = OTHER; note = 2'-O-methoxyethyl guanosine
  modified_base 2: mod_base = OTHER; note = 2'-O-methoxyethyl 5-methylcytidine
  modified_base 3: mod_base = OTHER; note = 2'-O-methoxyethyl adenosine
  modified_base 4: mod_base = OTHER; note = 2'-O-methoxyethyl guanosine
  modified_base 10: mod_base = OTHER; note = 2'-O-methoxyethyl adenosine
  modified_base 13: mod_base = OTHER; note = 2'-deoxy 5-methylcytidine
  modified_base 16: mod_base = OTHER; note = 2'-O-methoxyethyl adenosine
  modified_base 17: mod_base = OTHER; note = 2'-O-methoxyethyl guanosine
  modified_base 18: mod_base = OTHER; note = 2'-O-methoxyethyl thymidine
  modified_base 19: mod_base = OTHER; note = Locked nucleic acid with guanine base
  modified_base 20: mod_base = OTHER; note = Locked nucleic acid with 5-methylcytidine base
  misc_feature 1..4: note = RNA
  misc_feature 5..9: note = DNA
  misc_feature 10: note = RNA
  misc_feature 11..15: note = DNA
  misc_feature 16..20: note = RNA
gcagaggtgaagcgaagtgc

SEQ ID NO: 393 - DNA, 20 bp, synthetic construct
  source 1..20: mol_type = other DNA
  modified_base 1: mod_base = OTHER; note = 2'-O-methoxyethyl guanosine
  modified_base 2: mod_base = OTHER; note = 2'-O-methoxyethyl 5-methylcytidine
  modified_base 3: mod_base = OTHER; note = 2'-O-methoxyethyl adenosine
  modified_base 4: mod_base = OTHER; note = 2'-O-methoxyethyl guanosine
  modified_base 5: mod_base = OTHER; note = 2'-O-methoxyethyl adenosine
  modified_base 10: mod_base = OTHER; note = 2'-O-methoxyethyl adenosine
  modified_base 13: mod_base = OTHER; note = 2'-deoxy 5-methylcytidine
  modified_base 17: mod_base = OTHER; note = 2'-O-methoxyethyl guanosine
  modified_base 18: mod_base = OTHER; note = 2'-O-methoxyethyl thymidine
  modified_base 19: mod_base = OTHER; note = Locked nucleic acid with guanine base
  modified_base 20: mod_base = OTHER; note = Locked nucleic acid with 5-methylcytidine base
  misc_feature 1..5: note = RNA
  misc_feature 6..9: note = DNA
  misc_feature 10: note = RNA
  misc_feature 11..16: note = DNA
  misc_feature 17..20: note = RNA
gcagaggtgaagcgaagtgc

SEQ ID NO: 394 - DNA, 20 bp, synthetic construct
  source 1..20: mol_type = other DNA
  modified_base 1: mod_base = OTHER; note = 2'-O-methoxyethyl guanosine
  modified_base 2: mod_base = OTHER; note = 2'-O-methoxyethyl 5-methylcytidine
  modified_base 3: mod_base = OTHER; note = 2'-O-methoxyethyl adenosine
  modified_base 4: mod_base = OTHER; note = 2'-O-methoxyethyl guanosine
  modified_base 10: mod_base = OTHER; note = 2'-O-methyl adenosine
  modified_base 13: mod_base = OTHER; note = 2'-deoxy 5-methylcytidine
  modified_base 16: mod_base = OTHER; note = 2'-O-methoxyethyl adenosine
  modified_base 17: mod_base = OTHER; note = 2'-O-methoxyethyl guanosine
  modified_base 18: mod_base = OTHER; note = 2'-O-methoxyethyl thymidine
  modified_base 19: mod_base = OTHER; note = Locked nucleic acid with guanine base
  modified_base 20: mod_base = OTHER; note = Locked nucleic acid with 5-methylcytidine base
  misc_feature 1..4: note = RNA
  misc_feature 5..9: note = DNA
  misc_feature 10: note = RNA
  misc_feature 11..15: note = DNA
  misc_feature 16..20: note = RNA
gcagaggtgaagcgaagtgc

SEQ ID NO: 395 - DNA, 20 bp, synthetic construct
  source 1..20: mol_type = other DNA
  modified_base 1: mod_base = OTHER; note = 2'-O-methoxyethyl guanosine
  modified_base 2: mod_base = OTHER; note = 2'-O-methoxyethyl 5-methylcytidine
  modified_base 3: mod_base = OTHER; note = 2'-O-methoxyethyl adenosine
  modified_base 4: mod_base = OTHER; note = 2'-O-methoxyethyl guanosine
  modified_base 5: mod_base = OTHER; note = 2'-O-methoxyethyl adenosine
  modified_base 10: mod_base = OTHER; note = 2'-O-methyl adenosine
  modified_base 13: mod_base = OTHER; note = 2'-deoxy 5-methylcytidine
  modified_base 17: mod_base = OTHER; note = 2'-O-methoxyethyl guanosine
  modified_base 18: mod_base = OTHER; note = 2'-O-methoxyethyl thymidine
  modified_base 19: mod_base = OTHER; note = Locked nucleic acid with guanine base
  modified_base 20: mod_base = OTHER; note = Locked nucleic acid with 5-methylcytidine base
  misc_feature 1..5: note = RNA
  misc_feature 6..9: note = DNA
  misc_feature 10: note = RNA
  misc_feature 11..16: note = DNA
  misc_feature 17..20: note = RNA
gcagaggtgaagcgaagtgc

SEQ ID NO: 396 - DNA, 20 bp, synthetic construct
  source 1..20: mol_type = other DNA
  modified_base 1: mod_base = OTHER; note = Locked nucleic acid with guanine base
  modified_base 2: mod_base = OTHER; note = 2'-deoxy 5-methylcytidine
  modified_base 3: mod_base = OTHER; note = Locked nucleic acid with adenine base
  modified_base 4: mod_base = OTHER; note = 2'-O-methoxyethyl guanosine
  modified_base 10: mod_base = OTHER; note = 2'-O-methoxyethyl adenosine
  modified_base 13: mod_base = OTHER; note = 2'-deoxy 5-methylcytidine
  modified_base 17: mod_base = OTHER; note = 2'-O-methoxyethyl guanosine
  modified_base 18: mod_base = OTHER; note = 2'-O-methoxyethyl thymidine
  modified_base 19: mod_base = OTHER; note = 2'-O-methoxyethyl guanosine
  modified_base 20: mod_base = OTHER; note = 2'-O-methoxyethyl 5-methylcytidine
  misc_feature 1: note = RNA
  misc_feature 2: note = DNA
  misc_feature 3..4: note = RNA
  misc_feature 5..9: note = DNA
  misc_feature 10: note = RNA
  misc_feature 11..16: note = DNA
  misc_feature 17..20: note = RNA
gcagaggtgaagcgaagtgc

SEQ ID NO: 397 - DNA, 20 bp, synthetic construct
  source 1..20: mol_type = other DNA
  modified_base 1: mod_base = OTHER; note = Locked nucleic acid with guanine base
  modified_base 2: mod_base = OTHER; note = 2'-O-methoxyethyl 5-methylcytidine
  modified_base 3: mod_base = OTHER; note = Locked nucleic acid with adenine base
  modified_base 4: mod_base = OTHER; note = 2'-O-methoxyethyl guanosine
  modified_base 5: mod_base = OTHER; note = 2'-O-methoxyethyl adenosine
  modified_base 10: mod_base = OTHER; note = 2'-O-methoxyethyl adenosine
  modified_base 13: mod_base = OTHER; note = 2'-deoxy 5-methylcytidine
  modified_base 16: mod_base = OTHER; note = 2'-O-methoxyethyl adenosine
  modified_base 17: mod_base = OTHER; note = 2'-O-methoxyethyl guanosine
  modified_base 18: mod_base = OTHER; note = 2'-O-methoxyethyl thymidine
  modified_base 19: mod_base = OTHER; note = 2'-O-methoxyethyl guanosine
  modified_base 20: mod_base = OTHER; note = 2'-O-methoxyethyl 5-methylcytidine
  misc_feature 1..5: note = RNA
  misc_feature 6..9: note = DNA
  misc_feature 10: note = RNA
  misc_feature 11..15: note = DNA
  misc_feature 16..20: note = RNA
gcagaggtgaagcgaagtgc

SEQ ID NO: 398 - DNA, 20 bp, synthetic construct
  source 1..20: mol_type = other DNA
  modified_base 1: mod_base = OTHER; note = Locked nucleic acid with guanine base
  modified_base 2: mod_base = OTHER; note = 2'-O-methoxyethyl 5-methylcytidine
  modified_base 3: mod_base = OTHER; note = Locked nucleic acid with adenine base
  modified_base 4: mod_base = OTHER; note = 2'-O-methoxyethyl guanosine
  modified_base 5: mod_base = OTHER; note = 2'-O-methoxyethyl adenosine
  modified_base 10: mod_base = OTHER; note = 2'-O-methyl adenosine
  modified_base 13: mod_base = OTHER; note = 2'-deoxy 5-methylcytidine
  modified_base 16: mod_base = OTHER; note = 2'-O-methoxyethyl adenosine
  modified_base 17: mod_base = OTHER; note = 2'-O-methoxyethyl guanosine
  modified_base 18: mod_base = OTHER; note = 2'-O-methoxyethyl thymidine
  modified_base 19: mod_base = OTHER; note = 2'-O-methoxyethyl guanosine
  modified_base 20: mod_base = OTHER; note = 2'-O-methoxyethyl 5-methylcytidine
  misc_feature 1..5: note = RNA
  misc_feature 6..9: note = DNA
  misc_feature 10: note = RNA
  misc_feature 11..15: note = DNA
  misc_feature 16..20: note = RNA
gcagaggtgaagcgaagtgc

SEQ ID NO: 399 - DNA, 20 bp, synthetic construct
  source 1..20: mol_type = other DNA
  modified_base 1: mod_base = OTHER; note = Locked nucleic acid with guanine base
  modified_base 2: mod_base = OTHER; note = 2'-O-methoxyethyl 5-methylcytidine
  modified_base 3: mod_base = OTHER; note = Locked nucleic acid with adenine base
  modified_base 4: mod_base = OTHER; note = 2'-O-methoxyethyl guanosine
  modified_base 10: mod_base = OTHER; note = 2'-O-methyl adenosine
  modified_base 13: mod_base = OTHER; note = 2'-deoxy 5-methylcytidine
  modified_base 16: mod_base = OTHER; note = 2'-O-methoxyethyl adenosine
  modified_base 17: mod_base = OTHER; note = 2'-O-methoxyethyl guanosine
  modified_base 18: mod_base = OTHER; note = 2'-O-methoxyethyl thymidine
  modified_base 19: mod_base = OTHER; note = 2'-O-methoxyethyl guanosine
  modified_base 20: mod_base = OTHER; note = 2'-O-methoxyethyl 5-methylcytidine
  misc_feature 1..4: note = RNA
  misc_feature 5..9: note = DNA
  misc_feature 10: note = RNA
  misc_feature 11..15: note = DNA
  misc_feature 16..20: note = RNA
gcagaggtgaagcgaagtgc

SEQ ID NO: 400 - DNA, 20 bp, synthetic construct
  source 1..20: mol_type = other DNA
  modified_base 1: mod_base = OTHER; note = Locked nucleic acid with guanine base
  modified_base 2: mod_base = OTHER; note = 2'-O-methoxyethyl 5-methylcytidine
  modified_base 3: mod_base = OTHER; note = Locked nucleic acid with adenine base
  modified_base 4: mod_base = OTHER; note = 2'-O-methoxyethyl guanosine
  modified_base 10: mod_base = OTHER; note = 2'-O-methyl adenosine
  modified_base 13: mod_base = OTHER; note = 2'-deoxy 5-methylcytidine
  modified_base 16: mod_base = OTHER; note = 2'-O-methoxyethyl adenosine
  modified_base 17: mod_base = OTHER; note = 2'-O-methoxyethyl guanosine
  modified_base 18: mod_base = OTHER; note = 2'-O-methoxyethyl thymidine
  modified_base 19: mod_base = OTHER; note = 2'-O-methoxyethyl guanosine
  modified_base 20: mod_base = OTHER; note = 2'-O-methoxyethyl 5-methylcytidine
  misc_feature 1..4: note = RNA
  misc_feature 5..9: note = DNA
  misc_feature 10: note = RNA
  misc_feature 11..15: note = DNA
  misc_feature 16..20: note = RNA
gcagaggtgaagcgaagtgc

SEQ ID NO: 401 - DNA, 20 bp, synthetic construct
  source 1..20: mol_type = other DNA
  modified_base 1: mod_base = OTHER; note = Locked nucleic acid with guanine base
  modified_base 2: mod_base = OTHER; note = 2'-O-methoxyethyl 5-methylcytidine
  modified_base 3: mod_base = OTHER; note = Locked nucleic acid with adenine base
  modified_base 4: mod_base = OTHER; note = 2'-O-methoxyethyl guanosine
  modified_base 5: mod_base = OTHER; note = 2'-O-methoxyethyl adenosine
  modified_base 10: mod_base = OTHER; note = 2'-O-methoxyethyl adenosine
  modified_base 13: mod_base = OTHER; note = 2'-deoxy 5-methylcytidine
  modified_base 17: mod_base = OTHER; note = 2'-O-methoxyethyl guanosine
  modified_base 18: mod_base = OTHER; note = 2'-O-methoxyethyl thymidine
  modified_base 19: mod_base = OTHER; note = 2'-O-methoxyethyl guanosine
  modified_base 20: mod_base = OTHER; note = 2'-O-methoxyethyl 5-methylcytidine
  misc_feature 1..5: note = RNA
  misc_feature 6..9: note = DNA
  misc_feature 10: note = RNA
  misc_feature 11..16: note = DNA
  misc_feature 17..20: note = RNA
gcagaggtgaagcgaagtgc

SEQ ID NO: 402 - DNA, 20 bp, synthetic construct
  source 1..20: mol_type = other DNA
  modified_base 1: mod_base = OTHER; note = Locked nucleic acid with guanine base
  modified_base 2: mod_base = OTHER; note = 2'-deoxy 5-methylcytidine
  modified_base 3: mod_base = OTHER; note = Locked nucleic acid with adenine base
  modified_base 4: mod_base = OTHER; note = 2'-O-methoxyethyl guanosine
  modified_base 5: mod_base = OTHER; note = 2'-O-methoxyethyl adenosine
  modified_base 10: mod_base = OTHER; note = 2'-O-methoxyethyl adenosine
  modified_base 13: mod_base = OTHER; note = 2'-deoxy 5-methylcytidine
  modified_base 16: mod_base = OTHER; note = 2'-O-methoxyethyl adenosine
  modified_base 17: mod_base = OTHER; note = 2'-O-methoxyethyl guanosine
  modified_base 18: mod_base = OTHER; note = 2'-O-methoxyethyl thymidine
  modified_base 19: mod_base = OTHER; note = 2'-O-methoxyethyl guanosine
  modified_base 20: mod_base = OTHER; note = 2'-O-methoxyethyl 5-methylcytidine
  misc_feature 1: note = RNA
  misc_feature 2: note = DNA
  misc_feature 3..5: note = RNA
  misc_feature 6..9: note = DNA
  misc_feature 10: note = RNA
  misc_feature 11..15: note = DNA
  misc_feature 16..20: note = RNA
gcagaggtgaagcgaagtgc

SEQ ID NO: 403 - DNA, 20 bp, synthetic construct
  source 1..20: mol_type = other DNA
  modified_base 1: mod_base = OTHER; note = Locked nucleic acid with guanine base
  modified_base 2: mod_base = OTHER; note = 2'-deoxy 5-methylcytidine
  modified_base 3: mod_base = OTHER; note = Locked nucleic acid with adenine base
  modified_base 4: mod_base = OTHER; note = 2'-O-methoxyethyl guanosine
  modified_base 5: mod_base = OTHER; note = 2'-O-methoxyethyl adenosine
  modified_base 10: mod_base = OTHER; note = 2'-O-methoxyethyl adenosine
  modified_base 13: mod_base = OTHER; note = 2'-deoxy 5-methylcytidine
  modified_base 17: mod_base = OTHER; note = 2'-O-methoxyethyl guanosine
  modified_base 18: mod_base = OTHER; note = 2'-O-methoxyethyl thymidine
  modified_base 19: mod_base = OTHER; note = 2'-O-methoxyethyl guanosine
  modified_base 20: mod_base = OTHER; note = 2'-O-methoxyethyl 5-methylcytidine
  misc_feature 1: note = RNA
  misc_feature 2: note = DNA
  misc_feature 3..5: note = RNA
  misc_feature 6..9: note = DNA
  misc_feature 10: note = RNA
  misc_feature 11..16: note = DNA
  misc_feature 17..20: note = RNA
gcagaggtgaagcgaagtgc

SEQ ID NO: 404 - DNA, 20 bp, synthetic construct
  source 1..20: mol_type = other DNA
  modified_base 1: mod_base = OTHER; note = Locked nucleic acid with guanine base
  modified_base 2: mod_base = OTHER; note = 2'-deoxy 5-methylcytidine
  modified_base 3: mod_base = OTHER; note = Locked nucleic acid with adenine base
  modified_base 4: mod_base = OTHER; note = 2'-O-methoxyethyl guanosine
  modified_base 10: mod_base = OTHER; note = 2'-O-methoxyethyl adenosine
  modified_base 13: mod_base = OTHER; note = 2'-deoxy 5-methylcytidine
  modified_base 16: mod_base = OTHER; note = 2'-O-methoxyethyl adenosine
  modified_base 17: mod_base = OTHER; note = 2'-O-methoxyethyl guanosine
  modified_base 18: mod_base = OTHER; note = 2'-O-methoxyethyl thymidine
  modified_base 19: mod_base = OTHER; note = 2'-O-methoxyethyl guanosine
  modified_base 20: mod_base = OTHER; note = 2'-O-methoxyethyl 5-methylcytidine
  misc_feature 1: note = RNA
  misc_feature 2: note = DNA
  misc_feature 3..4: note = RNA
  misc_feature 5..9: note = DNA
  misc_feature 10: note = RNA
  misc_feature 11..15: note = DNA
  misc_feature 16..20: note = RNA
gcagaggtgaagcgaagtgc

SEQ ID NO: 405 - DNA, 20 bp, synthetic construct
  source 1..20: mol_type = other DNA
  modified_base 1: mod_base = OTHER; note = 2'-O-methoxyethyl guanosine
  modified_base 2: mod_base = OTHER; note = 2'-O-methoxyethyl 5-methylcytidine
  modified_base 3: mod_base = OTHER; note = 2'-O-methoxyethyl adenosine
  modified_base 4: mod_base = OTHER; note = 2'-O-methoxyethyl guanosine
  modified_base 5: mod_base = OTHER; note = 2'-O-methoxyethyl adenosine
  modified_base 13: mod_base = OTHER; note = 2'-deoxy 5-methylcytidine
  modified_base 16: mod_base = OTHER; note = 2'-O-methoxyethyl adenosine
  modified_base 17: mod_base = OTHER; note = 2'-O-methoxyethyl guanosine
  modified_base 18: mod_base = OTHER; note = 2'-O-methoxyethyl thymidine
  modified_base 19: mod_base = OTHER; note = 2'-O-methoxyethyl guanosine
  modified_base 20: mod_base = OTHER; note = 2'-O-methoxyethyl 5-methylcytidine
  misc_feature 1..5: note = RNA
  misc_feature 6..15: note = DNA
  misc_feature 16..20: note = RNA
gcagaggtgaagcgaagtgc

SEQ ID NO: 406 - DNA, 20 bp, synthetic construct
  source 1..20: mol_type = other DNA
  modified_base 1: mod_base = OTHER; note = Locked nucleic acid with guanine base
  modified_base 2: mod_base = OTHER; note = 2'-O-methoxyethyl 5-methylcytidine
  modified_base 3: mod_base = OTHER; note = Locked nucleic acid with adenine base
  modified_base 5: mod_base = OTHER; note = 2'-O-methoxyethyl adenosine
  modified_base 10: mod_base = OTHER; note = 2'-O-methoxyethyl adenosine
  modified_base 13: mod_base = OTHER; note = 2'-deoxy 5-methylcytidine
  modified_base 16: mod_base = OTHER; note = 2'-O-methoxyethyl adenosine
  modified_base 17: mod_base = OTHER; note = 2'-O-methoxyethyl guanosine
  modified_base 18: mod_base = OTHER; note = 2'-O-methoxyethyl thymidine
  modified_base 19: mod_base = OTHER; note = 2'-O-methoxyethyl guanosine
  modified_base 20: mod_base = OTHER; note = 2'-O-methoxyethyl 5-methylcytidine
  misc_feature 1..3: note = RNA
  misc_feature 4: note = DNA
  misc_feature 5: note = RNA
  misc_feature 6..9: note = DNA
  misc_feature 10: note = RNA
  misc_feature 11..15: note = DNA
  misc_feature 16..20: note = RNA
gcagaggtgaagcgaagtgc

SEQ ID NO: 407 - DNA, 20 bp, synthetic construct
  source 1..20: mol_type = other DNA
  modified_base 1: mod_base = OTHER; note = Locked nucleic acid with guanine base
  modified_base 2: mod_base = OTHER; note = 2'-deoxy 5-methylcytidine
  modified_base 3: mod_base = OTHER; note = Locked nucleic acid with adenine base
  modified_base 5: mod_base = OTHER; note = 2'-O-methoxyethyl adenosine
  modified_base 10: mod_base = OTHER; note = 2'-O-methoxyethyl adenosine
  modified_base 13: mod_base = OTHER; note = 2'-deoxy 5-methylcytidine
  modified_base 16: mod_base = OTHER; note = 2'-O-methoxyethyl adenosine
  modified_base 17: mod_base = OTHER; note = 2'-O-methoxyethyl guanosine
  modified_base 18: mod_base = OTHER; note = 2'-O-methoxyethyl thymidine
  modified_base 19: mod_base = OTHER; note = 2'-O-methoxyethyl guanosine
  modified_base 20: mod_base = OTHER; note = 2'-O-methoxyethyl 5-methylcytidine
  misc_feature 1: note = RNA
  misc_feature 2: note = DNA
  misc_feature 3: note = RNA
  misc_feature 4: note = DNA
  misc_feature 5: note = RNA
  misc_feature 6..9: note = DNA
  misc_feature 10: note = RNA
  misc_feature 11..15: note = DNA
  misc_feature 16..20: note = RNA
gcagaggtgaagcgaagtgc

SEQ ID NO: 408 - DNA, 20 bp, synthetic construct
  source 1..20: mol_type = other DNA
  modified_base 1: mod_base = OTHER; note = Locked nucleic acid with guanine base
  modified_base 2: mod_base = OTHER; note = 2'-O-methoxyethyl 5-methylcytidine
  modified_base 3: mod_base = OTHER; note = Locked nucleic acid with adenine base
  modified_base 10: mod_base = OTHER; note = 2'-O-methoxyethyl adenosine
  modified_base 13: mod_base = OTHER; note = 2'-deoxy 5-methylcytidine
  modified_base 16: mod_base = OTHER; note = 2'-O-methoxyethyl adenosine
  modified_base 17: mod_base = OTHER; note = 2'-O-methoxyethyl guanosine
  modified_base 18: mod_base = OTHER; note = 2'-O-methoxyethyl thymidine
  modified_base 19: mod_base = OTHER; note = 2'-O-methoxyethyl guanosine
  modified_base 20: mod_base = OTHER; note = 2'-O-methoxyethyl 5-methylcytidine
  misc_feature 1..3: note = RNA
  misc_feature 4..9: note = DNA
  misc_feature 10: note = RNA
  misc_feature 11..15: note = DNA
  misc_feature 16..20: note = RNA
gcagaggtgaagcgaagtgc

SEQ ID NO: 409 - DNA, 20 bp, synthetic construct
  source 1..20: mol_type = other DNA
  modified_base 1: mod_base = OTHER; note = 2'-O-methoxyethyl guanosine
  modified_base 2: mod_base = OTHER; note = 2'-O-methoxyethyl 5-methylcytidine
  modified_base 3: mod_base = OTHER; note = 2'-O-methoxyethyl adenosine
  modified_base 4: mod_base = OTHER; note = 2'-O-methoxyethyl guanosine
  modified_base 5: mod_base = OTHER; note = 2'-O-methoxyethyl adenosine
  modified_base 10: mod_base = OTHER; note = 2'-O-methoxyethyl adenosine
  modified_base 13: mod_base = OTHER; note = 2'-deoxy 5-methylcytidine
  modified_base 15: mod_base = OTHER; note = 2'-O-methoxyethyl adenosine
  modified_base 16: mod_base = OTHER; note = 2'-O-methoxyethyl adenosine
  modified_base 17: mod_base = OTHER; note = 2'-O-methoxyethyl guanosine
  modified_base 18: mod_base = OTHER; note = 2'-O-methoxyethyl thymidine
  modified_base 19: mod_base = OTHER; note = 2'-O-methoxyethyl guanosine
  modified_base 20: mod_base = OTHER; note = 2'-O-methoxyethyl 5-methylcytidine
  misc_feature 1..5: note = RNA
  misc_feature 6..9: note = DNA
  misc_feature 10: note = RNA
  misc_feature 11..14: note = DNA
  misc_feature 15..20: note = RNA
gcagaggtgaagcgaagtgc

SEQ ID NO: 410 - DNA, 20 bp, synthetic construct
  source 1..20: mol_type = other DNA
  modified_base 1: mod_base = OTHER; note = 2'-O-methoxyethyl guanosine
  modified_base 2: mod_base = OTHER; note = 2'-O-methoxyethyl 5-methylcytidine
  modified_base 3: mod_base = OTHER; note = 2'-O-methoxyethyl adenosine
  modified_base 4: mod_base = OTHER; note = 2'-O-methoxyethyl guanosine
  modified_base 10: mod_base = OTHER; note = 2'-O-methoxyethyl adenosine
  modified_base 13: mod_base = OTHER; note = 2'-deoxy 5-methylcytidine
  modified_base 15: mod_base = OTHER; note = 2'-O-methoxyethyl adenosine
  modified_base 16: mod_base = OTHER; note = 2'-O-methoxyethyl adenosine
  modified_base 17: mod_base = OTHER; note = 2'-O-methoxyethyl guanosine
  modified_base 18: mod_base = OTHER; note = 2'-O-methoxyethyl thymidine
  modified_base 19: mod_base = OTHER; note = 2'-O-methoxyethyl guanosine
  modified_base 20: mod_base = OTHER; note = 2'-O-methoxyethyl 5-methylcytidine
  misc_feature 1..4: note = RNA
  misc_feature 5..9: note = DNA
  misc_feature 10: note = RNA
  misc_feature 11..14: note = DNA
  misc_feature 15..20: note = RNA
gcagaggtgaagcgaagtgc

SEQ ID NO: 411 - DNA, 20 bp, synthetic construct
  source 1..20: mol_type = other DNA
  modified_base 1: mod_base = OTHER; note = 2'-O-methoxyethyl guanosine
  modified_base 2: mod_base = OTHER; note = 2'-deoxy 5-methylcytidine
  modified_base 3: mod_base = OTHER; note = 2'-O-methoxyethyl adenosine
  modified_base 4: mod_base = OTHER; note = 2'-O-methoxyethyl guanosine
  modified_base 5: mod_base = OTHER; note = 2'-O-methoxyethyl adenosine
  modified_base 10: mod_base = OTHER; note = 2'-O-methoxyethyl adenosine
  modified_base 13: mod_base = OTHER; note = 2'-deoxy 5-methylcytidine
  modified_base 15: mod_base = OTHER; note = 2'-O-methoxyethyl adenosine
  modified_base 16: mod_base = OTHER; note = 2'-O-methoxyethyl adenosine
  modified_base 17: mod_base = OTHER; note = 2'-O-methoxyethyl guanosine
  modified_base 18: mod_base = OTHER; note = 2'-O-methoxyethyl thymidine
  modified_base 19: mod_base = OTHER; note = 2'-O-methoxyethyl guanosine
  modified_base 20: mod_base = OTHER; note = 2'-O-methoxyethyl 5-methylcytidine
  misc_feature 1: note = RNA
  misc_feature 2: note = DNA
  misc_feature 3..5: note = RNA
  misc_feature 6..9: note = DNA
  misc_feature 10: note = RNA
  misc_feature 11..14: note = DNA
  misc_feature 15..20: note = RNA
gcagaggtgaagcgaagtgc

SEQ ID NO: 412 - DNA, 20 bp, synthetic construct
  source 1..20: mol_type = other DNA
  modified_base 1: mod_base = OTHER; note = 2'-O-methoxyethyl guanosine
  modified_base 2: mod_base = OTHER; note = 2'-O-methoxyethyl 5-methylcytidine
  modified_base 3: mod_base = OTHER; note = 2'-O-methoxyethyl adenosine
  modified_base 5: mod_base = OTHER; note = 2'-O-methoxyethyl adenosine
  modified_base 10: mod_base = OTHER; note = 2'-O-methoxyethyl adenosine
  modified_base 13: mod_base = OTHER; note = 2'-deoxy 5-methylcytidine
  modified_base 15: mod_base = OTHER; note = 2'-O-methoxyethyl adenosine
  modified_base 16: mod_base = OTHER; note = 2'-O-methoxyethyl adenosine
  modified_base 17: mod_base = OTHER; note = 2'-O-methoxyethyl guanosine
  modified_base 18: mod_base = OTHER; note = 2'-O-methoxyethyl thymidine
  modified_base 19: mod_base = OTHER; note = 2'-O-methoxyethyl guanosine
  modified_base 20: mod_base = OTHER; note = 2'-O-methoxyethyl 5-methylcytidine
  misc_feature 1..3: note = RNA
  misc_feature 4: note = DNA
  misc_feature 5: note = RNA
  misc_feature 6..9: note = DNA
  misc_feature 10: note = RNA
  misc_feature 11..14: note = DNA
  misc_feature 15..20: note = RNA
gcagaggtgaagcgaagtgc

SEQ ID NO: 413 - DNA, 20 bp, synthetic construct
  source 1..20: mol_type = other DNA
  modified_base 1: mod_base = OTHER; note = 2'-O-methoxyethyl guanosine
  modified_base 2: mod_base = OTHER; note = 2'-O-methoxyethyl 5-methylcytidine
  modified_base 4: mod_base = OTHER; note = 2'-O-methoxyethyl guanosine
  modified_base 5: mod_base = OTHER; note = 2'-O-methoxyethyl adenosine
  modified_base 10: mod_base = OTHER; note = 2'-O-methoxyethyl adenosine
  modified_base 13: mod_base = OTHER; note = 2'-deoxy 5-methylcytidine
  modified_base 15: mod_base = OTHER; note = 2'-O-methoxyethyl adenosine
  modified_base 16: mod_base = OTHER; note = 2'-O-methoxyethyl adenosine
  modified_base 17: mod_base = OTHER; note = 2'-O-methoxyethyl guanosine
  modified_base 18: mod_base = OTHER; note = 2'-O-methoxyethyl thymidine
  modified_base 19: mod_base = OTHER; note = 2'-O-methoxyethyl guanosine
  modified_base 20: mod_base = OTHER; note = 2'-O-methoxyethyl 5-methylcytidine
  misc_feature 1..2: note = RNA
  misc_feature 3: note = DNA
  misc_feature 4..5: note = RNA
  misc_feature 6..9: note = DNA
  misc_feature 10: note = RNA
  misc_feature 11..14: note = DNA
  misc_feature 15..20: note = RNA
gcagaggtgaagcgaagtgc

SEQ ID NO: 414 - DNA, 20 bp, synthetic construct
  source 1..20: mol_type = other DNA
  modified_base 1: mod_base = OTHER; note = 2'-O-methoxyethyl guanosine
  modified_base 2: mod_base = OTHER; note = 2'-O-methoxyethyl 5-methylcytidine
  modified_base 3: mod_base = OTHER; note = 2'-O-methoxyethyl adenosine
  modified_base 4: mod_base = OTHER; note = 2'-O-methoxyethyl guanosine
  modified_base 5: mod_base = OTHER; note = 2'-O-methoxyethyl adenosine
  modified_base 10: mod_base = OTHER; note = 2'-O-methoxyethyl adenosine
  modified_base 13: mod_base = OTHER; note = 2'-deoxy 5-methylcytidine
  modified_base 16: mod_base = OTHER; note = 2'-O-methoxyethyl adenosine
  modified_base 17: mod_base = OTHER; note = 2'-O-methoxyethyl guanosine
  modified_base 18: mod_base = OTHER; note = 2'-O-methoxyethyl thymidine
  modified_base 19: mod_base = OTHER; note = 2'-O-methoxyethyl guanosine
  modified_base 20: mod_base = OTHER; note = 2'-O-methoxyethyl 5-methylcytidine
  misc_feature 1..5: note = RNA
  misc_feature 6..9: note = DNA
  misc_feature 10: note = RNA
  misc_feature 11..15: note = DNA
  misc_feature 16..20: note = RNA
gcagaggtgaagcgaagtgc

SEQ ID NO: 415 - DNA, 20 bp, synthetic construct
  source 1..20: mol_type = other DNA
  modified_base 1: mod_base = OTHER; note = 2'-O-methoxyethyl guanosine
  modified_base 2: mod_base = OTHER; note = 2'-deoxy 5-methylcytidine
  modified_base 3: mod_base = OTHER; note = 2'-O-methoxyethyl adenosine
  modified_base 4: mod_base = OTHER; note = 2'-O-methoxyethyl guanosine
  modified_base 5: mod_base = OTHER; note = 2'-O-methoxyethyl adenosine
  modified_base 10: mod_base = OTHER; note = 2'-O-methoxyethyl adenosine
  modified_base 13: mod_base = OTHER; note = 2'-deoxy 5-methylcytidine
  modified_base 16: mod_base = OTHER; note = 2'-O-methoxyethyl adenosine
  modified_base 17: mod_base = OTHER; note = 2'-O-methoxyethyl guanosine
  modified_base 18: mod_base = OTHER; note = 2'-O-methoxyethyl thymidine
  modified_base 19: mod_base = OTHER; note = 2'-O-methoxyethyl guanosine
  modified_base 20: mod_base = OTHER; note = 2'-O-methoxyethyl 5-methylcytidine
  misc_feature 1: note = RNA
  misc_feature 2: note = DNA
  misc_feature 3..5: note = RNA
  misc_feature 6..9: note = DNA
  misc_feature 10: note = RNA
  misc_feature 11..15: note = DNA
  misc_feature 16..20: note = RNA
gcagaggtgaagcgaagtgc

SEQ ID NO: 416 - DNA, 20 bp, synthetic construct
  source 1..20: mol_type = other DNA
  modified_base 1: mod_base = OTHER; note = 2'-O-methoxyethyl guanosine
  modified_base 2: mod_base = OTHER; note = 2'-O-methoxyethyl 5-methylcytidine
  modified_base 3: mod_base = OTHER; note = 2'-O-methoxyethyl adenosine
  modified_base 5: mod_base = OTHER; note = 2'-O-methoxyethyl adenosine
  modified_base 10: mod_base = OTHER; note = 2'-O-methoxyethyl adenosine
  modified_base 13: mod_base = OTHER; note = 2'-deoxy 5-methylcytidine
  modified_base 16: mod_base = OTHER; note = 2'-O-methoxyethyl adenosine
  modified_base 17: mod_base = OTHER; note = 2'-O-methoxyethyl guanosine
  modified_base 18: mod_base = OTHER; note = 2'-O-methoxyethyl thymidine
  modified_base 19: mod_base = OTHER; note = 2'-O-methoxyethyl guanosine
  modified_base 20: mod_base = OTHER; note = 2'-O-methoxyethyl 5-methylcytidine
  misc_feature 1..3: note = RNA
  misc_feature 4: note = DNA
  misc_feature 5: note = RNA
  misc_feature 6..9: note = DNA
  misc_feature 10: note = RNA
  misc_feature 11..15: note = DNA
  misc_feature 16..20: note = RNA
gcagaggtgaagcgaagtgc

SEQ ID NO: 417 - DNA, 20 bp, synthetic construct
  source 1..20: mol_type = other DNA
  modified_base 1: mod_base = OTHER; note = 2'-O-methoxyethyl guanosine
  modified_base 2: mod_base = OTHER; note = 2'-O-methoxyethyl 5-methylcytidine
  modified_base 3: mod_base = OTHER; note = 2'-O-methoxyethyl adenosine
  modified_base 4: mod_base = OTHER; note = 2'-O-methoxyethyl guanosine
  modified_base 5: mod_base = OTHER; note = 2'-O-methoxyethyl adenosine
  modified_base 10: mod_base = OTHER; note = 2'-O-methyl adenosine
  modified_base 13: mod_base = OTHER; note = 2'-deoxy 5-methylcytidine
  modified_base 15: mod_base = OTHER; note = 2'-O-methyl adenosine
  modified_base 16: mod_base = OTHER; note = 2'-O-methoxyethyl adenosine
  modified_base 17: mod_base = OTHER; note = 2'-O-methoxyethyl guanosine
  modified_base 18: mod_base = OTHER; note = 2'-O-methoxyethyl thymidine
  modified_base 19: mod_base = OTHER; note = 2'-O-methoxyethyl guanosine
  modified_base 20: mod_base = OTHER; note = 2'-O-methoxyethyl 5-methylcytidine
  misc_feature 1..5: note = RNA
  misc_feature 6..9: note = DNA
  misc_feature 10: note = RNA
  misc_feature 11..14: note = DNA
  misc_feature 15..20: note = RNA
gcagaggtgaagcgaagtgc

SEQ ID NO: 418 - DNA, 20 bp, synthetic construct
  source 1..20: mol_type = other DNA
  modified_base 1: mod_base = OTHER; note = 2'-O-methoxyethyl guanosine
  modified_base 2: mod_base = OTHER; note = 2'-O-methoxyethyl 5-methylcytidine
  modified_base 3: mod_base = OTHER; note = 2'-O-methoxyethyl adenosine
  modified_base 4: mod_base = OTHER; note = 2'-O-methoxyethyl guanosine
  modified_base 5: mod_base = OTHER; note = 2'-O-methoxyethyl adenosine
  modified_base 10: mod_base = OTHER; note = 2'-O-methoxyethyl adenosine
  modified_base 13: mod_base = OTHER; note = 2'-deoxy 5-methylcytidine
  modified_base 17: mod_base = OTHER; note = 2'-O-methoxyethyl guanosine
  modified_base 18: mod_base = OTHER; note = 2'-O-methoxyethyl thymidine
  modified_base 19: mod_base = OTHER; note = 2'-O-methoxyethyl guanosine
  modified_base 20: mod_base = OTHER; note = 2'-O-methoxyethyl 5-methylcytidine
  misc_feature 1..5: note = RNA
  misc_feature 6..9: note = DNA
  misc_feature 10: note = RNA
  misc_feature 11..16: note = DNA
  misc_feature 17..20: note = RNA
gcagaggtgaagcgaagtgc

SEQ ID NO: 419 - DNA, 20 bp, synthetic construct
  source 1..20: mol_type = other DNA
  modified_base 1: mod_base = OTHER; note = 2'-O-methoxyethyl guanosine
  modified_base 2: mod_base = OTHER; note = 2'-O-methoxyethyl 5-methylcytidine
  modified_base 3: mod_base = OTHER; note = 2'-O-methoxyethyl adenosine
  modified_base 4: mod_base = OTHER; note = 2'-O-methoxyethyl guanosine
  modified_base 10: mod_base = OTHER; note = 2'-O-methoxyethyl adenosine
  modified_base 13: mod_base = OTHER; note = 2'-deoxy 5-methylcytidine
  modified_base 17: mod_base = OTHER; note = 2'-O-methoxyethyl guanosine
  modified_base 18: mod_base = OTHER; note = 2'-O-methoxyethyl thymidine
  modified_base 19: mod_base = OTHER; note = 2'-O-methoxyethyl guanosine
  modified_base 20: mod_base = OTHER; note = 2'-O-methoxyethyl 5-methylcytidine
  misc_feature 1..4: note = RNA
  misc_feature 5..9: note = DNA
  misc_feature 10: note = RNA
  misc_feature 11..16: note = DNA
  misc_feature 17..20: note = RNA
gcagaggtgaagcgaagtgc

SEQ ID NO: 420 - DNA, 20 bp, synthetic construct
  source 1..20: mol_type = other DNA
  modified_base 1: mod_base = OTHER; note = 2'-O-methoxyethyl guanosine
  modified_base 2: mod_base = OTHER; note = 2'-O-methoxyethyl 5-methylcytidine
  modified_base 3: mod_base = OTHER; note = 2'-O-methoxyethyl adenosine
  modified_base 10: mod_base = OTHER; note = 2'-O-methoxyethyl adenosine
  modified_base 13: mod_base = OTHER; note = 2'-deoxy 5-methylcytidine
  modified_base 17: mod_base = OTHER; note = 2'-O-methoxyethyl guanosine
  modified_base 18: mod_base = OTHER; note = 2'-O-methoxyethyl thymidine
  modified_base 19: mod_base = OTHER; note = 2'-O-methoxyethyl guanosine
  modified_base 20: mod_base = OTHER; note = 2'-O-methoxyethyl 5-methylcytidine
  misc_feature 1..3: note = RNA
  misc_feature 4..9: note = DNA
  misc_feature 10: note = RNA
  misc_feature 11..16: note = DNA
  misc_feature 17..20: note = RNA
gcagaggtgaagcgaagtgc

SEQ ID NO: 421 - DNA, 20 bp, synthetic construct
  source 1..20: mol_type = other DNA
  modified_base 1: mod_base = OTHER; note = 2'-O-methoxyethyl guanosine
  modified_base 2: mod_base = OTHER; note = 2'-O-methoxyethyl 5-methylcytidine
  modified_base 3: mod_base = OTHER; note = 2'-O-methoxyethyl adenosine
  modified_base 4: mod_base = OTHER; note = 2'-O-methoxyethyl guanosine
  modified_base 5: mod_base = OTHER; note = 2'-O-methoxyethyl adenosine
  modified_base 10: mod_base = OTHER; note = 2'-O-methoxyethyl adenosine
  modified_base 13: mod_base = OTHER; note = 2'-deoxy 5-methylcytidine
  modified_base 16: mod_base = OTHER; note = Locked nucleic acid with adenine base
  modified_base 17: mod_base = OTHER; note = 2'-O-methoxyethyl guanosine
  modified_base 18: mod_base = OTHER; note = 2'-O-methoxyethyl thymidine
  modified_base 19: mod_base = OTHER; note = 2'-O-methoxyethyl guanosine
  modified_base 20: mod_base = OTHER; note = Locked nucleic acid with 5-methylcytidine base
  misc_feature 1..5: note = RNA
  misc_feature 6..9: note = DNA
  misc_feature 10: note = RNA
  misc_feature 11..15: note = DNA
  misc_feature 16..20: note = RNA
gcagaggtgaagcgaagtgc

SEQ ID NO: 422 - DNA, 20 bp, synthetic construct
  source 1..20: mol_type = other DNA
  modified_base 1: mod_base = OTHER; note = 2'-O-methoxyethyl guanosine
  modified_base 2: mod_base = OTHER; note = 2'-O-methoxyethyl 5-methylcytidine
  modified_base 3: mod_base = OTHER; note = 2'-O-methoxyethyl adenosine
  modified_base 4: mod_base = OTHER; note = 2'-O-methoxyethyl guanosine
  modified_base 5: mod_base = OTHER; note = 2'-O-methoxyethyl adenosine
  modified_base 10: mod_base = OTHER; note = 2'-O-methoxyethyl adenosine
  modified_base 13: mod_base = OTHER; note = 2'-deoxy 5-methylcytidine
  modified_base 16: mod_base = OTHER; note = Locked nucleic acid with adenine base
  modified_base 17: mod_base = OTHER; note = 2'-O-methoxyethyl guanosine
  modified_base 18: mod_base = OTHER; note = 2'-O-methoxyethyl thymidine
  modified_base 19: mod_base = OTHER; note = Locked nucleic acid with guanine base
  modified_base 20: mod_base = OTHER; note = 2'-O-methoxyethyl 5-methylcytidine
  misc_feature 1..5: note = RNA
  misc_feature 6..9: note = DNA
  misc_feature 10: note = RNA
  misc_feature 11..15: note = DNA
  misc_feature 16..20: note = RNA
gcagaggtgaagcgaagtgc

SEQ ID NO: 423 - DNA, 20 bp, synthetic construct
  source 1..20: mol_type = other DNA
  modified_base 1: mod_base = OTHER; note = 2'-O-methoxyethyl guanosine
  modified_base 2: mod_base = OTHER; note = 2'-O-methoxyethyl 5-methylcytidine
  modified_base 3: mod_base = OTHER; note = 2'-O-methoxyethyl adenosine
  modified_base 4: mod_base = OTHER; note = 2'-O-methoxyethyl guanosine
  modified_base 5: mod_base = OTHER; note = 2'-O-methoxyethyl adenosine
  modified_base 10: mod_base = OTHER; note = 2'-O-methoxyethyl adenosine
  modified_base 13: mod_base = OTHER; note = 2'-deoxy 5-methylcytidine
  modified_base 16: mod_base = OTHER; note = Locked nucleic acid with adenine base
  modified_base 17: mod_base = OTHER; note = 2'-O-methoxyethyl guanosine
  modified_base 18: mod_base = OTHER; note = Locked nucleic acid with thymine base
  modified_base 19: mod_base = OTHER; note = 2'-O-methoxyethyl guanosine
  modified_base 20: mod_base = OTHER; note = 2'-O-methoxyethyl 5-methylcytidine
  misc_feature 1..5: note = RNA
  misc_feature 6..9: note = DNA
  misc_feature 10: note = RNA
  misc_feature 11..15: note = DNA
  misc_feature 16..20: note = RNA
gcagaggtgaagcgaagtgc

SEQ ID NO: 424 - DNA, 20 bp, synthetic construct
  source 1..20: mol_type = other DNA
  modified_base 1: mod_base = OTHER; note = 2'-O-methoxyethyl guanosine
  modified_base 2: mod_base = OTHER; note = 2'-O-methoxyethyl 5-methylcytidine
  modified_base 3: mod_base = OTHER; note = 2'-O-methoxyethyl adenosine
  modified_base 4: mod_base = OTHER; note = 2'-O-methoxyethyl guanosine
  modified_base 5: mod_base = OTHER; note = 2'-O-methoxyethyl adenosine
  modified_base 10: mod_base = OTHER; note = 2'-O-methoxyethyl adenosine
  modified_base 13: mod_base = OTHER; note = 2'-deoxy 5-methylcytidine
  modified_base 16: mod_base = OTHER; note = 2'-O-methoxyethyl adenosine
  modified_base 17: mod_base = OTHER; note = Locked nucleic acid with guanine base
  modified_base 18: mod_base = OTHER; note = Locked nucleic acid with thymine base
  modified_base 19: mod_base = OTHER; note = 2'-O-methoxyethyl guanosine
  modified_base 20: mod_base = OTHER; note = 2'-O-methoxyethyl 5-methylcytidine
  misc_feature 1..5: note = RNA
  misc_feature 6..9: note = DNA
  misc_feature 10: note = RNA
  misc_feature 11..15: note = DNA
  misc_feature 16..20: note = RNA
gcagaggtgaagcgaagtgc

SEQ ID NO: 425 - DNA, 20 bp, synthetic construct
  source 1..20: mol_type = other DNA
  modified_base 1: mod_base = OTHER; note = 2'-O-methoxyethyl guanosine
  modified_base 2: mod_base = OTHER; note = 2'-deoxy 5-methylcytidine
  modified_base 3: mod_base = OTHER; note = 2'-O-methoxyethyl adenosine
  modified_base 4: mod_base = OTHER; note = 2'-O-methoxyethyl guanosine
  modified_base 5: mod_base = OTHER; note = 2'-O-methoxyethyl adenosine
  modified_base 10: mod_base = OTHER; note = 2'-O-methoxyethyl adenosine
  modified_base 13: mod_base = OTHER; note = 2'-deoxy 5-methylcytidine
  modified_base 16: mod_base = OTHER; note = 2'-O-methoxyethyl adenosine
  modified_base 17: mod_base = OTHER; note = Locked nucleic acid with guanine base
  modified_base 18: mod_base = OTHER; note = Locked nucleic acid with thymine base
  modified_base 19: mod_base = OTHER; note = 2'-O-methoxyethyl guanosine
  modified_base 20: mod_base = OTHER; note = 2'-O-methoxyethyl 5-methylcytidine
  misc_feature 1: note = RNA
  misc_feature 2: note = DNA
  misc_feature 3..5: note = RNA
  misc_feature 6..9: note = DNA
  misc_feature 10: note = RNA
  misc_feature 11..15: note = DNA
  misc_feature 16..20: note = RNA
gcagaggtgaagcgaagtgc

SEQ ID NO: 426 - DNA, 20 bp, synthetic construct
  source 1..20: mol_type = other DNA
  modified_base 1: mod_base = OTHER; note = 2'-O-methoxyethyl guanosine
  modified_base 2: mod_base = OTHER; note = 2'-O-methoxyethyl 5-methylcytidine
  modified_base 3: mod_base = OTHER; note = 2'-O-methoxyethyl adenosine
  modified_base 4: mod_base = OTHER; note = 2'-O-methoxyethyl guanosine
  modified_base 10: mod_base = OTHER; note = 2'-O-methoxyethyl adenosine
  modified_base 13: mod_base = OTHER; note = 2'-deoxy 5-methylcytidine
  modified_base 16: mod_base = OTHER; note = 2'-O-methoxyethyl adenosine
  modified_base 17: mod_base = OTHER; note = Locked nucleic acid with guanine base
  modified_base 18: mod_base = OTHER; note = Locked nucleic acid with thymine base
  modified_base 19: mod_base = OTHER; note = 2'-O-methoxyethyl guanosine
  modified_base 20: mod_base = OTHER; note = 2'-O-methoxyethyl 5-methylcytidine
  misc_feature 1..4: note = RNA
  misc_feature 5..9: note = DNA
  misc_feature 10: note = RNA
  misc_feature 11..15: note = DNA
  misc_feature 16..20: note = RNA
gcagaggtgaagcgaagtgc

SEQ ID NO: 427 - DNA, 20 bp, synthetic construct
  source 1..20: mol_type = other DNA
  modified_base 1: mod_base = OTHER; note = 2'-O-methoxyethyl guanosine
  modified_base 2: mod_base = OTHER; note = 2'-deoxy 5-methylcytidine
  modified_base 3: mod_base = OTHER; note = 2'-O-methoxyethyl adenosine
  modified_base 4: mod_base = OTHER; note = 2'-O-methoxyethyl guanosine
  modified_base 10: mod_base = OTHER; note = 2'-O-methoxyethyl adenosine
  modified_base 13: mod_base = OTHER; note = 2'-deoxy 5-methylcytidine
  modified_base 16: mod_base = OTHER; note = 2'-O-methoxyethyl adenosine
  modified_base 17: mod_base = OTHER; note = Locked nucleic acid with guanine base
  modified_base 18: mod_base = OTHER; note = Locked nucleic acid with thymine base
  modified_base 19: mod_base = OTHER; note = 2'-O-methoxyethyl guanosine
  modified_base 20: mod_base = OTHER; note = 2'-O-methoxyethyl 5-methylcytidine
  misc_feature 1: note = RNA
  misc_feature 2: note = DNA
  misc_feature 3..4: note = RNA
  misc_feature 5..9: note = DNA
  misc_feature 10: note = RNA
  misc_feature 11..15: note = DNA
  misc_feature 16..20: note = RNA
gcagaggtgaagcgaagtgc

SEQ ID NO: 428 - DNA, 20 bp, synthetic construct
  source 1..20: mol_type = other DNA
  modified_base 1: mod_base = OTHER; note = 2'-O-methoxyethyl guanosine
  modified_base 2: mod_base = OTHER; note = 2'-deoxy 5-methylcytidine
  modified_base 3: mod_base = OTHER; note = 2'-O-methoxyethyl adenosine
  modified_base 4: mod_base = OTHER; note = 2'-O-methoxyethyl guanosine
  modified_base 5: mod_base = OTHER; note = 2'-O-methoxyethyl adenosine
  modified_base 10: mod_base = OTHER; note = 2'-O-methoxyethyl adenosine
  modified_base 13: mod_base = OTHER; note = 2'-deoxy 5-methylcytidine
  modified_base 16: mod_base = OTHER; note = 2'-O-methoxyethyl adenosine
  modified_base 17: mod_base = OTHER; note = Locked nucleic acid with guanine base
  modified_base 18: mod_base = OTHER; note = 2'-O-methoxyethyl thymidine
  modified_base 19: mod_base = OTHER; note = 2'-O-methoxyethyl guanosine
  modified_base 20: mod_base = OTHER; note = Locked nucleic acid with 5-methylcytidine base
  misc_feature 1: note = RNA
  misc_feature 2: note = DNA
  misc_feature 3..5: note = RNA
  misc_feature 6..9: note = DNA
  misc_feature 10: note = RNA
  misc_feature 11..15: note = DNA
  misc_feature 16..20: note = RNA
gcagaggtgaagcgaagtgc

SEQ ID NO: 429 - DNA, 20 bp, synthetic construct
  source 1..20: mol_type = other DNA
  modified_base 1: mod_base = OTHER; note = 2'-O-methoxyethyl guanosine
  modified_base 2: mod_base = OTHER; note = 2'-O-methoxyethyl 5-methylcytidine
  modified_base 3: mod_base = OTHER; note = 2'-O-methoxyethyl adenosine
  modified_base 4: mod_base = OTHER; note = 2'-O-methoxyethyl guanosine
  modified_base 10: mod_base = OTHER; note = 2'-O-methoxyethyl adenosine
  modified_base 13: mod_base = OTHER; note = 2'-deoxy 5-methylcytidine
  modified_base 16: mod_base = OTHER; note = 2'-O-methoxyethyl adenosine
  modified_base 17: mod_base = OTHER; note = Locked nucleic acid with guanine base
  modified_base 18: mod_base = OTHER; note = 2'-O-methoxyethyl thymidine
  modified_base 19: mod_base = OTHER; note = 2'-O-methoxyethyl guanosine
  modified_base 20: mod_base = OTHER; note = Locked nucleic acid with 5-methylcytidine base
  misc_feature 1..4: note = RNA
  misc_feature 5..9: note = DNA
  misc_feature 10: note = RNA
  misc_feature 11..15: note = DNA
  misc_feature 16..20: note = RNA
gcagaggtgaagcgaagtgc

SEQ ID NO: 430 - DNA, 20 bp, synthetic construct
  source 1..20: mol_type = other DNA
  modified_base 1: mod_base = OTHER; note = 2'-O-methoxyethyl guanosine
  modified_base 2: mod_base = OTHER; note = 2'-deoxy 5-methylcytidine
  modified_base 3: mod_base = OTHER; note = 2'-O-methoxyethyl adenosine
  modified_base 4: mod_base = OTHER; note = 2'-O-methoxyethyl guanosine
  modified_base 10: mod_base = OTHER; note = 2'-O-methoxyethyl adenosine
  modified_base 13: mod_base = OTHER; note = 2'-deoxy 5-methylcytidine
  modified_base 16: mod_base = OTHER; note = 2'-O-methoxyethyl adenosine
  modified_base 17: mod_base = OTHER; note = Locked nucleic acid with guanine base
  modified_base 18: mod_base = OTHER; note = 2'-O-methoxyethyl thymidine
  modified_base 19: mod_base = OTHER; note = 2'-O-methoxyethyl guanosine
  modified_base 20: mod_base = OTHER; note = Locked nucleic acid with 5-methylcytidine base
  misc_feature 1: note = RNA
  misc_feature 2: note = DNA
  misc_feature 3..4: note = RNA
  misc_feature 5..9: note = DNA
  misc_feature 10: note = RNA
  misc_feature 11..15: note = DNA
  misc_feature 16..20: note = RNA
gcagaggtgaagcgaagtgc

SEQ ID NO: 431 - DNA, 20 bp, synthetic construct
  source 1..20: mol_type = other DNA
  modified_base 1: mod_base = OTHER; note = 2'-O-methoxyethyl guanosine
  modified_base 2: mod_base = OTHER; note = 2'-O-methoxyethyl 5-methylcytidine
  modified_base 3: mod_base = OTHER; note = 2'-O-methoxyethyl adenosine
  modified_base 4: mod_base = OTHER; note = 2'-O-methoxyethyl guanosine
  modified_base 10: mod_base = OTHER; note = 2'-O-methoxyethyl adenosine
  modified_base 13: mod_base = OTHER; note = 2'-deoxy 5-methylcytidine
  modified_base 16: mod_base = OTHER; note = 2'-O-methoxyethyl adenosine
  modified_base 17: mod_base = OTHER; note = Locked nucleic acid with guanine base
  modified_base 18: mod_base = OTHER; note = 2'-O-methoxyethyl thymidine
  modified_base 19: mod_base = OTHER; note = Locked nucleic acid with guanine base
  modified_base 20: mod_base = OTHER; note = 2'-O-methoxyethyl 5-methylcytidine
  misc_feature 1..4: note = RNA
  misc_feature 5..9: note = DNA
  misc_feature 10: note = RNA
  misc_feature 11..15: note = DNA
  misc_feature 16..20: note = RNA
gcagaggtgaagcgaagtgc

SEQ ID NO: 432 - DNA, 20 bp, synthetic construct
  source 1..20: mol_type = other DNA
  modified_base 1: mod_base = OTHER; note = 2'-O-methoxyethyl guanosine
  modified_base 2: mod_base = OTHER; note = 2'-deoxy 5-methylcytidine
  modified_base 3: mod_base = OTHER; note = 2'-O-methoxyethyl adenosine
  modified_base 4: mod_base = OTHER; note = 2'-O-methoxyethyl guanosine
  modified_base 5: mod_base = OTHER; note = 2'-O-methoxyethyl adenosine
  modified_base 10: mod_base = OTHER; note = 2'-O-methoxyethyl adenosine
  modified_base 13: mod_base = OTHER; note = 2'-deoxy 5-methylcytidine
  modified_base 16: mod_base = OTHER; note = 2'-O-methoxyethyl adenosine
  modified_base 17: mod_base = OTHER; note = Locked nucleic acid with guanine base
  modified_base 18: mod_base = OTHER; note = Locked nucleic acid with thymine base
  modified_base 19: mod_base = OTHER; note = Locked nucleic acid with guanine base
  modified_base 20: mod_base = OTHER; note = 2'-O-methoxyethyl 5-methylcytidine
  misc_feature 1: note = RNA
  misc_feature 2: note = DNA
  misc_feature 3..5: note = RNA
  misc_feature 6..9: note = DNA
  misc_feature 10: note = RNA
  misc_feature 11..15: note = DNA
  misc_feature 16..20: note = RNA
gcagaggtgaagcgaagtgc

SEQ ID NO: 433 - DNA, 20 bp, synthetic construct
  source 1..20: mol_type = other DNA
  modified_base 1: mod_base = OTHER; note = 2'-O-methoxyethyl guanosine
  modified_base 2: mod_base = OTHER; note = 2'-O-methoxyethyl 5-methylcytidine
  modified_base 3: mod_base = OTHER; note = 2'-O-methoxyethyl adenosine
  modified_base 4: mod_base = OTHER; note = 2'-O-methoxyethyl guanosine
  modified_base 10: mod_base = OTHER; note = 2'-O-methoxyethyl adenosine
  modified_base 13: mod_base = OTHER; note = 2'-deoxy 5-methylcytidine
  modified_base 16: mod_base = OTHER; note = 2'-O-methoxyethyl adenosine
  modified_base 17: mod_base = OTHER; note = Locked nucleic acid with guanine base
  modified_base 18: mod_base = OTHER; note = Locked nucleic acid with thymine base
  modified_base 19: mod_base = OTHER; note = Locked nucleic acid with guanine base
  modified_base 20: mod_base = OTHER; note = 2'-O-methoxyethyl 5-methylcytidine
  misc_feature 1..4: note = RNA
  misc_feature 5..9: note = DNA
  misc_feature 10: note = RNA
  misc_feature 11..15: note = DNA
  misc_feature 16..20: note = RNA
gcagaggtgaagcgaagtgc

SEQ ID NO: 434 - DNA, 20 bp, synthetic construct
  source 1..20: mol_type = other DNA
  modified_base 1: mod_base = OTHER; note = 2'-O-methoxyethyl guanosine
  modified_base 2: mod_base = OTHER; note = 2'-deoxy 5-methylcytidine
  modified_base 3: mod_base = OTHER; note = 2'-O-methoxyethyl adenosine
  modified_base 4: mod_base = OTHER; note = 2'-O-methoxyethyl guanosine
  modified_base 10: mod_base = OTHER; note = 2'-O-methoxyethyl adenosine
  modified_base 13: mod_base = OTHER; note = 2'-deoxy 5-methylcytidine
  modified_base 16: mod_base = OTHER; note = 2'-O-methoxyethyl adenosine
  modified_base 17: mod_base = OTHER; note = Locked nucleic acid with guanine base
  modified_base 18: mod_base = OTHER; note = Locked nucleic acid with thymine base
  modified_base 19: mod_base = OTHER; note = Locked nucleic acid with guanine base
  modified_base 20: mod_base = OTHER; note = 2'-O-methoxyethyl 5-methylcytidine
  misc_feature 1: note = RNA
  misc_feature 2: note = DNA
  misc_feature 3..4: note = RNA
  misc_feature 5..9: note = DNA
  misc_feature 10: note = RNA
  misc_feature 11..15: note = DNA
  misc_feature 16..20: note = RNA
gcagaggtgaagcgaagtgc

SEQ ID NO: 435 - DNA, 20 bp, synthetic construct
  source 1..20: mol_type = other DNA
  modified_base 1: mod_base = OTHER; note = 2'-O-methoxyethyl guanosine
  modified_base 2: mod_base = OTHER; note = 2'-O-methoxyethyl 5-methylcytidine
  modified_base 3: mod_base = OTHER; note = 2'-O-methoxyethyl adenosine
  modified_base 5: mod_base = OTHER; note = 2'-O-methoxyethyl adenosine
  modified_base 10: mod_base = OTHER; note = 2'-O-methoxyethyl adenosine
  modified_base 13: mod_base = OTHER; note = 2'-deoxy 5-methylcytidine
  modified_base 16: mod_base = OTHER; note = 2'-O-methoxyethyl adenosine
  modified_base 17: mod_base = OTHER; note = Locked nucleic acid with guanine base
  modified_base 18: mod_base = OTHER; note = Locked nucleic acid with thymine base
  modified_base 19: mod_base = OTHER; note = 2'-O-methoxyethyl guanosine
  modified_base 20: mod_base = OTHER; note = 2'-O-methoxyethyl 5-methylcytidine
  misc_feature 1..3: note = RNA
  misc_feature 4: note = DNA
  misc_feature 5: note = RNA
  misc_feature 6..9: note = DNA
  misc_feature 10: note = RNA
  misc_feature 11..15: note = DNA
  misc_feature 16..20: note = RNA
gcagaggtgaagcgaagtgc

SEQ ID NO: 436 - DNA, 20 bp, synthetic construct
  source 1..20: mol_type = other DNA
  modified_base 1: mod_base = OTHER; note = 2'-O-methoxyethyl guanosine
  modified_base 2: mod_base = OTHER; note = 2'-O-methoxyethyl 5-methylcytidine
  modified_base 4: mod_base = OTHER; note = 2'-O-methoxyethyl guanosine
  modified_base 5: mod_base = OTHER; note = 2'-O-methoxyethyl adenosine
  modified_base 10: mod_base = OTHER; note = 2'-O-methoxyethyl adenosine
  modified_base 13: mod_base = OTHER; note = 2'-deoxy 5-methylcytidine
  modified_base 16: mod_base = OTHER; note = 2'-O-methoxyethyl adenosine
  modified_base 17: mod_base = OTHER; note = Locked nucleic acid with guanine base
  modified_base 18: mod_base = OTHER; note = Locked nucleic acid with thymine base
  modified_base 19: mod_base = OTHER; note = 2'-O-methoxyethyl guanosine
  modified_base 20: mod_base = OTHER; note = 2'-O-methoxyethyl 5-methylcytidine
  misc_feature 1..2: note = RNA
  misc_feature 3: note = DNA
  misc_feature 4..5: note = RNA
  misc_feature 6..9: note = DNA
  misc_feature 10: note = RNA
  misc_feature 11..15: note = DNA
  misc_feature 16..20: note = RNA
gcagaggtgaagcgaagtgc

SEQ ID NO: 437 - DNA, 20 bp, synthetic construct
  source 1..20: mol_type = other DNA
  modified_base 1: mod_base = OTHER; note = 2'-O-methoxyethyl guanosine
  modified_base 2: mod_base = OTHER; note = 2'-deoxy 5-methylcytidine
  modified_base 3: mod_base = OTHER; note = 2'-O-methoxyethyl adenosine
  modified_base 5: mod_base = OTHER; note = 2'-O-methoxyethyl adenosine
  modified_base 10: mod_base = OTHER; note = 2'-O-methoxyethyl adenosine
  modified_base 13: mod_base = OTHER; note = 2'-deoxy 5-methylcytidine
  modified_base 16: mod_base = OTHER; note = 2'-O-methoxyethyl adenosine
  modified_base 17: mod_base = OTHER; note = Locked nucleic acid with guanine base
  modified_base 18: mod_base = OTHER; note = Locked nucleic acid with thymine base
  modified_base 19: mod_base = OTHER; note = 2'-O-methoxyethyl guanosine
  modified_base 20: mod_base = OTHER; note = 2'-O-methoxyethyl 5-methylcytidine
  misc_feature 1: note = RNA
  misc_feature 2: note = DNA
  misc_feature 3: note = RNA
  misc_feature 4: note = DNA
  misc_feature 5: note = RNA
  misc_feature 6..9: note = DNA
  misc_feature 10: note = RNA
  misc_feature 11..15: note = DNA
  misc_feature 16..20: note = RNA
gcagaggtgaagcgaagtgc

SEQ ID NO: 438 - DNA, 20 bp, synthetic construct
  source 1..20: mol_type = other DNA
  modified_base 1: mod_base = OTHER; note = 2'-O-methoxyethyl guanosine
  modified_base 2: mod_base = OTHER; note = 2'-deoxy 5-methylcytidine
  modified_base 3: mod_base = OTHER; note = 2'-O-methoxyethyl adenosine
  modified_base 4: mod_base = OTHER; note = 2'-O-methoxyethyl guanosine
  modified_base 5: mod_base = OTHER; note = 2'-O-methoxyethyl adenosine
  modified_base 10: mod_base = OTHER; note = 2'-O-methoxyethyl adenosine
  modified_base 13: mod_base = OTHER; note = 2'-deoxy 5-methylcytidine
  modified_base 16: mod_base = OTHER; note = 2'-O-methoxyethyl adenosine
  modified_base 17: mod_base = OTHER; note = Locked nucleic acid with guanine base
  modified_base 18: mod_base = OTHER; note = 2'-O-methoxyethyl thymidine
  modified_base 19: mod_base = OTHER; note = Locked nucleic acid with guanine base
  modified_base 20: mod_base = OTHER; note = Locked nucleic acid with 5-methylcytidine base
  misc_feature 1: note = RNA
  misc_feature 2: note = DNA
  misc_feature 3..5: note = RNA
  misc_feature 6..9: note = DNA
  misc_feature 10: note = RNA
  misc_feature 11..15: note = DNA
  misc_feature 16..20: note = RNA
gcagaggtgaagcgaagtgc

SEQ ID NO: 439 - DNA, 20 bp, synthetic construct
  source 1..20: mol_type = other DNA
  modified_base 1: mod_base = OTHER; note = 2'-O-methoxyethyl guanosine
  modified_base 2: mod_base = OTHER; note = 2'-O-methoxyethyl 5-methylcytidine
  modified_base 3: mod_base = OTHER; note = 2'-O-methoxyethyl adenosine
  modified_base 4: mod_base = OTHER; note = 2'-O-methoxyethyl guanosine
  modified_base 10: mod_base = OTHER; note = 2'-O-methoxyethyl adenosine
  modified_base 13: mod_base = OTHER; note = 2'-deoxy 5-methylcytidine
  modified_base 16: mod_base = OTHER; note = 2'-O-methoxyethyl adenosine
  modified_base 17: mod_base = OTHER; note = Locked nucleic acid with guanine base
  modified_base 18: mod_base = OTHER; note = 2'-O-methoxyethyl thymidine
  modified_base 19: mod_base = OTHER; note = Locked nucleic acid with guanine base
  modified_base 20: mod_base = OTHER; note = Locked nucleic acid with 5-methylcytidine base
  misc_feature 1..4: note = RNA
  misc_feature 5..9: note = DNA
  misc_feature 10: note = RNA
  misc_feature 11..15: note = DNA
  misc_feature 16..20: note = RNA
gcagaggtgaagcgaagtgc

SEQ ID NO: 440 - DNA, 20 bp, synthetic construct
  source 1..20: mol_type = other DNA
  modified_base 1: mod_base = OTHER; note = 2'-O-methoxyethyl guanosine
  modified_base 2: mod_base = OTHER; note = 2'-deoxy 5-methylcytidine
  modified_base 3: mod_base = OTHER; note = 2'-O-methoxyethyl adenosine
  modified_base 4: mod_base = OTHER; note = 2'-O-methoxyethyl guanosine
  modified_base 10: mod_base = OTHER; note = 2'-O-methoxyethyl adenosine
  modified_base 13: mod_base = OTHER; note = 2'-deoxy 5-methylcytidine
  modified_base 16: mod_base = OTHER; note = 2'-O-methoxyethyl adenosine
  modified_base 17: mod_base = OTHER; note = Locked nucleic acid with guanine base
  modified_base 18: mod_base = OTHER; note = 2'-O-methoxyethyl thymidine
  modified_base 19: mod_base = OTHER; note = Locked nucleic acid with guanine base
  modified_base 20: mod_base = OTHER; note = Locked nucleic acid with 5-methylcytidine base
  misc_feature 1: note = RNA
  misc_feature 2: note = DNA
  misc_feature 3..4: note = RNA
  misc_feature 5..9: note = DNA
  misc_feature 10: note = RNA
  misc_feature 11..15: note = DNA
  misc_feature 16..20: note = RNA
gcagaggtgaagcgaagtgc

SEQ ID NO: 441 - DNA, 20 bp, synthetic construct
  source 1..20: mol_type = other DNA
  modified_base 1: mod_base = OTHER; note = 2'-O-methoxyethyl guanosine
  modified_base 2: mod_base = OTHER; note = 2'-deoxy 5-methylcytidine
  modified_base 4: mod_base = OTHER; note = 2'-O-methoxyethyl guanosine
  modified_base 5: mod_base = OTHER; note = 2'-O-methoxyethyl adenosine
  modified_base 10: mod_base = OTHER; note = 2'-O-methoxyethyl adenosine
  modified_base 13: mod_base = OTHER; note = 2'-deoxy 5-methylcytidine
  modified_base 16: mod_base = OTHER; note = 2'-O-methoxyethyl adenosine
  modified_base 17: mod_base = OTHER; note = Locked nucleic acid with guanine base
  modified_base 18: mod_base = OTHER; note = Locked nucleic acid with thymine base
  modified_base 19: mod_base = OTHER; note = 2'-O-methoxyethyl guanosine
  modified_base 20: mod_base = OTHER; note = 2'-O-methoxyethyl 5-methylcytidine
  misc_feature 1: note = RNA
  misc_feature 2..3: note = DNA
  misc_feature 4..5: note = RNA
  misc_feature 6..9: note = DNA
  misc_feature 10: note = RNA
  misc_feature 11..15: note = DNA
  misc_feature 16..20: note = RNA
gcagaggtgaagcgaagtgc

SEQ ID NO: 442 - DNA, 20 bp, synthetic construct
  source 1..20: mol_type = other DNA
  modified_base 1: mod_base = OTHER; note = 2'-O-methoxyethyl guanosine
  modified_base 2: mod_base = OTHER; note = 2'-O-methoxyethyl 5-methylcytidine
  modified_base 5: mod_base = OTHER; note = 2'-O-methoxyethyl adenosine
  modified_base 10: mod_base = OTHER; note = 2'-O-methoxyethyl adenosine
  modified_base 13: mod_base = OTHER; note = 2'-deoxy 5-methylcytidine
  modified_base 16: mod_base = OTHER; note = 2'-O-methoxyethyl adenosine
  modified_base 17: mod_base = OTHER; note = Locked nucleic acid with guanine base
  modified_base 18: mod_base = OTHER; note = Locked nucleic acid with thymine base
  modified_base 19: mod_base = OTHER; note = 2'-O-methoxyethyl guanosine
  modified_base 20: mod_base = OTHER; note = 2'-O-methoxyethyl 5-methylcytidine
  misc_feature 1..2: note = RNA
  misc_feature 3..4: note = DNA
  misc_feature 5: note = RNA
  misc_feature 6..9: note = DNA
  misc_feature 10: note = RNA
  misc_feature 11..15: note = DNA
  misc_feature 16..20: note = RNA
gcagaggtgaagcgaagtgc

SEQ ID NO: 443 - DNA, 20 bp, synthetic construct
  source 1..20: mol_type = other DNA
  modified_base 1: mod_base = OTHER; note = 2'-O-methoxyethyl guanosine
  modified_base 2: mod_base = OTHER; note = 2'-O-methoxyethyl 5-methylcytidine
  modified_base 3: mod_base = OTHER; note = 2'-O-methoxyethyl adenosine
  modified_base 4: mod_base = OTHER; note = 2'-O-methoxyethyl guanosine
  modified_base 5: mod_base = OTHER; note = 2'-O-methoxyethyl adenosine
  modified_base 13: mod_base = OTHER; note = 2'-deoxy 5-methylcytidine
  modified_base 16: mod_base = OTHER; note = 2'-O-methoxyethyl adenosine
  modified_base 17: mod_base = OTHER; note = Locked nucleic acid with guanine base
  modified_base 18: mod_base = OTHER; note = Locked nucleic acid with thymine base
  modified_base 19: mod_base = OTHER; note = 2'-O-methoxyethyl guanosine
  modified_base 20: mod_base = OTHER; note = 2'-O-methoxyethyl 5-methylcytidine
  misc_feature 1..5: note = RNA
  misc_feature 6..15: note = DNA
  misc_feature 16..20: note = RNA
gcagaggtgaagcgaagtgc

SEQ ID NO: 444 - DNA, 20 bp, synthetic construct
  source 1..20: mol_type = other DNA
  modified_base 1: mod_base = OTHER; note = 2'-O-methoxyethyl guanosine
  modified_base 2: mod_base = OTHER; note = 2'-deoxy 5-methylcytidine
  modified_base 3: mod_base = OTHER; note = 2'-O-methoxyethyl adenosine
  modified_base 4: mod_base = OTHER; note = 2'-O-methoxyethyl guanosine
  modified_base 5: mod_base = OTHER; note = 2'-O-methoxyethyl adenosine
  modified_base 13: mod_base = OTHER; note = 2'-deoxy 5-methylcytidine
  modified_base 16: mod_base = OTHER; note = 2'-O-methoxyethyl adenosine
  modified_base 17: mod_base = OTHER; note = Locked nucleic acid with guanine base
  modified_base 18: mod_base = OTHER; note = Locked nucleic acid with thymine base
  modified_base 19: mod_base = OTHER; note = 2'-O-methoxyethyl guanosine
  modified_base 20: mod_base = OTHER; note = 2'-O-methoxyethyl 5-methylcytidine
  misc_feature 1: note = RNA
  misc_feature 2: note = DNA
  misc_feature 3..5: note = RNA
  misc_feature 6..15: note = DNA
  misc_feature 16..20: note = RNA
gcagaggtgaagcgaagtgc

SEQ ID NO: 445 - DNA, 20 bp, synthetic construct
  source 1..20: mol_type = other DNA
  modified_base 1: mod_base = OTHER; note = 2'-O-methoxyethyl guanosine
  modified_base 2: mod_base = OTHER; note = 2'-O-methoxyethyl 5-methylcytidine
  modified_base 3: mod_base = OTHER; note = 2'-O-methoxyethyl adenosine
  modified_base 4: mod_base = OTHER; note = 2'-O-methoxyethyl guanosine
  modified_base 13: mod_base = OTHER; note = 2'-deoxy 5-methylcytidine
  modified_base 16: mod_base = OTHER; note = 2'-O-methoxyethyl adenosine
  modified_base 17: mod_base = OTHER; note = Locked nucleic acid with guanine base
  modified_base 18: mod_base = OTHER; note = Locked nucleic acid with thymine base
  modified_base 19: mod_base = OTHER; note = 2'-O-methoxyethyl guanosine
  modified_base 20: mod_base = OTHER; note = 2'-O-methoxyethyl 5-methylcytidine
  misc_feature 1..4: note = RNA
  misc_feature 5..15: note = DNA
  misc_feature 16..20: note = RNA
gcagaggtgaagcgaagtgc

SEQ ID NO: 446 - DNA, 20 bp, synthetic construct
  source 1..20: mol_type = other DNA
  modified_base 1: mod_base = OTHER; note = 2'-O-methoxyethyl guanosine
  modified_base 2: mod_base = OTHER; note = 2'-deoxy 5-methylcytidine
  modified_base 3: mod_base = OTHER; note = 2'-O-methoxyethyl adenosine
  modified_base 4: mod_base = OTHER; note = 2'-O-methoxyethyl guanosine
  modified_base 13: mod_base = OTHER; note = 2'-deoxy 5-methylcytidine
  modified_base 16: mod_base = OTHER; note = 2'-O-methoxyethyl adenosine
  modified_base 17: mod_base = OTHER; note = Locked nucleic acid with guanine base
  modified_base 18: mod_base = OTHER; note = Locked nucleic acid with thymine base
  modified_base 19: mod_base = OTHER; note = 2'-O-methoxyethyl guanosine
  modified_base 20: mod_base = OTHER; note = 2'-O-methoxyethyl 5-methylcytidine
  misc_feature 1: note = RNA
  misc_feature 2: note = DNA
  misc_feature 3..4: note = RNA
  misc_feature 5..15: note = DNA
  misc_feature 16..20: note = RNA
gcagaggtgaagcgaagtgc

SEQ ID NO: 447 - DNA, 20 bp, synthetic construct
  source 1..20: mol_type = other DNA
  modified_base 1: mod_base = OTHER; note = 2'-O-methoxyethyl guanosine
  modified_base 2: mod_base = OTHER; note = 2'-O-methoxyethyl 5-methylcytidine
  modified_base 3: mod_base = OTHER; note = 2'-O-methoxyethyl adenosine
  modified_base 4: mod_base = OTHER; note = 2'-O-methoxyethyl guanosine
  modified_base 10: mod_base = OTHER; note = 2'-O-methoxyethyl adenosine
  modified_base 13: mod_base = OTHER; note = 2'-deoxy 5-methylcytidine
  modified_base 16: mod_base = OTHER; note = 2'-O-methoxyethyl adenosine
  modified_base 17: mod_base = OTHER; note = 2'-O-methoxyethyl guanosine
  modified_base 18: mod_base = OTHER; note = 2'-O-methoxyethyl thymidine
  modified_base 19: mod_base = OTHER; note = 2'-O-methoxyethyl guanosine
  modified_base 20: mod_base = OTHER; note = 2'-O-methoxyethyl 5-methylcytidine
  misc_feature 1..4: note = RNA
  misc_feature 5..9: note = DNA
  misc_feature 10: note = RNA
  misc_feature 11..15: note = DNA
  misc_feature 16..20: note = RNA
gcagaggtgaagcgaagtgc

SEQ ID NO: 448 - DNA, 20 bp, synthetic construct
  source 1..20: mol_type = other DNA
  modified_base 1: mod_base = OTHER; note = 2'-O-methoxyethyl guanosine
  modified_base 2: mod_base = OTHER; note = 2'-deoxy 5-methylcytidine
  modified_base 3: mod_base = OTHER; note = 2'-O-methoxyethyl adenosine
  modified_base 4: mod_base = OTHER; note = 2'-O-methoxyethyl guanosine
  modified_base 10: mod_base = OTHER; note = 2'-O-methoxyethyl adenosine
  modified_base 13: mod_base = OTHER; note = 2'-deoxy 5-methylcytidine
  modified_base 16: mod_base = OTHER; note = 2'-O-methoxyethyl adenosine
  modified_base 17: mod_base = OTHER; note = 2'-O-methoxyethyl guanosine
  modified_base 18: mod_base = OTHER; note = 2'-O-methoxyethyl thymidine
  modified_base 19: mod_base = OTHER; note = 2'-O-methoxyethyl guanosine
  modified_base 20: mod_base = OTHER; note = 2'-O-methoxyethyl 5-methylcytidine
  misc_feature 1: note = RNA
  misc_feature 2: note = DNA
  misc_feature 3..4: note = RNA
  misc_feature 5..9: note = DNA
  misc_feature 10: note = RNA
  misc_feature 11..15: note = DNA
  misc_feature 16..20: note = RNA
gcagaggtgaagcgaagtgc

SEQ ID NO: 449 - DNA, 20 bp, synthetic construct
  source 1..20: mol_type = other DNA
  modified_base 1: mod_base = OTHER; note = 2'-O-methoxyethyl guanosine
  modified_base 2: mod_base = OTHER; note = 2'-O-methoxyethyl 5-methylcytidine
  modified_base 4: mod_base = OTHER; note = 2'-O-methoxyethyl guanosine
  modified_base 5: mod_base = OTHER; note = 2'-O-methoxyethyl adenosine
  modified_base 10: mod_base = OTHER; note = 2'-O-methoxyethyl adenosine
  modified_base 13: mod_base = OTHER; note = 2'-deoxy 5-methylcytidine
  modified_base 16: mod_base = OTHER; note = 2'-O-methoxyethyl adenosine
  modified_base 17: mod_base = OTHER; note = 2'-O-methoxyethyl guanosine
  modified_base 18: mod_base = OTHER; note = 2'-O-methoxyethyl thymidine
  modified_base 19: mod_base = OTHER; note = 2'-O-methoxyethyl guanosine
  modified_base 20: mod_base = OTHER; note = 2'-O-methoxyethyl 5-methylcytidine
  misc_feature 1..2: note = RNA
  misc_feature 3: note = DNA
  misc_feature 4..5: note = RNA
  misc_feature 6..9: note = DNA
  misc_feature 10: note = RNA
  misc_feature 11..15: note = DNA
  misc_feature 16..20: note = RNA
gcagaggtgaagcgaagtgc

SEQ ID NO: 450 - DNA, 20 bp, synthetic construct
  source 1..20: mol_type = other DNA
  modified_base 1: mod_base = OTHER; note = 2'-O-methoxyethyl guanosine
  modified_base 2: mod_base = OTHER; note = 2'-deoxy 5-methylcytidine
  modified_base 3: mod_base = OTHER; note = 2'-O-methoxyethyl adenosine
  modified_base 5: mod_base = OTHER; note = 2'-O-methoxyethyl adenosine
  modified_base 10: mod_base = OTHER; note = 2'-O-methoxyethyl adenosine
  modified_base 13: mod_base = OTHER; note = 2'-deoxy 5-methylcytidine
  modified_base 16: mod_base = OTHER; note = 2'-O-methoxyethyl adenosine
  modified_base 17: mod_base = OTHER; note = 2'-O-methoxyethyl guanosine
  modified_base 18: mod_base = OTHER; note = 2'-O-methoxyethyl thymidine
  modified_base 19: mod_base = OTHER; note = 2'-O-methoxyethyl guanosine
  modified_base 20: mod_base = OTHER; note = 2'-O-methoxyethyl 5-methylcytidine
  misc_feature 1: note = RNA
  misc_feature 2: note = DNA
  misc_feature 3: note = RNA
  misc_feature 4: note = DNA
  misc_feature 5: note = RNA
  misc_feature 6..9: note = DNA
  misc_feature 10: note = RNA
  misc_feature 11..15: note = DNA
  misc_feature 16..20: note = RNA
gcagaggtgaagcgaagtgc

SEQ ID NO: 451 - DNA, 20 bp, synthetic construct
  source 1..20: mol_type = other DNA
  modified_base 1: mod_base = OTHER; note = 2'-O-methoxyethyl guanosine
  modified_base 2: mod_base = OTHER; note = 2'-deoxy 5-methylcytidine
  modified_base 3: mod_base = OTHER; note = 2'-O-methoxyethyl adenosine
  modified_base 4: mod_base = OTHER; note = 2'-O-methoxyethyl guanosine
  modified_base 10: mod_base = OTHER; note = 2'-O-methoxyethyl adenosine
  modified_base 13: mod_base = OTHER; note = 2'-deoxy 5-methylcytidine
  modified_base 15: mod_base = OTHER; note = 2'-O-methoxyethyl adenosine
  modified_base 16: mod_base = OTHER; note = 2'-O-methoxyethyl adenosine
  modified_base 17: mod_base = OTHER; note = Locked nucleic acid with guanine base
  modified_base 18: mod_base = OTHER; note = Locked nucleic acid with thymine base
  modified_base 19: mod_base = OTHER; note = 2'-O-methoxyethyl guanosine
  modified_base 20: mod_base = OTHER; note = 2'-O-methoxyethyl 5-methylcytidine
  misc_feature 1: note = RNA
  misc_feature 2: note = DNA
  misc_feature 3..4: note = RNA
  misc_feature 5..9: note = DNA
  misc_feature 10: note = RNA
  misc_feature 11..14: note = DNA
  misc_feature 15..20: note = RNA
gcagaggtgaagcgaagtgc

SEQ ID NO: 452 - DNA, 20 bp, synthetic construct
  source 1..20: mol_type = other DNA
  modified_base 1: mod_base = OTHER; note = 2'-O-methoxyethyl guanosine
  modified_base 2: mod_base = OTHER; note = 2'-O-methoxyethyl 5-methylcytidine
  modified_base 3: mod_base = OTHER; note = 2'-O-methoxyethyl adenosine
  modified_base 4: mod_base = OTHER; note = 2'-O-methoxyethyl guanosine
  modified_base 10: mod_base = OTHER; note = 2'-O-methoxyethyl adenosine
  modified_base 13: mod_base = OTHER; note = 2'-deoxy 5-methylcytidine
  modified_base 15: mod_base = OTHER; note = 2'-O-methoxyethyl adenosine
  modified_base 16: mod_base = OTHER; note = 2'-O-methoxyethyl adenosine
  modified_base 17: mod_base = OTHER; note = Locked nucleic acid with guanine base
  modified_base 18: mod_base = OTHER; note = Locked nucleic acid with thymine base
  modified_base 19: mod_base = OTHER; note = 2'-O-methoxyethyl guanosine
  modified_base 20: mod_base = OTHER; note = 2'-O-methoxyethyl 5-methylcytidine
  misc_feature 1..4: note = RNA
  misc_feature 5..9: note = DNA
  misc_feature 10: note = RNA
  misc_feature 11..14: note = DNA
  misc_feature 15..20: note = RNA
gcagaggtgaagcgaagtgc

SEQ ID NO: 453 - DNA, 20 bp, synthetic construct
  source 1..20: mol_type = other DNA
  modified_base 1: mod_base = OTHER; note = 2'-O-methoxyethyl guanosine
  modified_base 2: mod_base = OTHER; note = 2'-O-methoxyethyl 5-methylcytidine
  modified_base 3: mod_base = OTHER; note = 2'-O-methoxyethyl adenosine
  modified_base 4: mod_base = OTHER; note = 2'-O-methoxyethyl guanosine
  modified_base 5: mod_base = OTHER; note = 2'-O-methoxyethyl adenosine
  modified_base 10: mod_base = OTHER; note = 2'-O-methoxyethyl adenosine
  modified_base 13: mod_base = OTHER; note = 2'-deoxy 5-methylcytidine
  modified_base 15: mod_base = OTHER; note = 2'-O-methoxyethyl adenosine
  modified_base 16: mod_base = OTHER; note = 2'-O-methoxyethyl adenosine
  modified_base 17: mod_base = OTHER; note = Locked nucleic acid with guanine base
  modified_base 18: mod_base = OTHER; note = Locked nucleic acid with thymine base
  modified_base 19: mod_base = OTHER; note = 2'-O-methoxyethyl guanosine
  modified_base 20: mod_base = OTHER; note = 2'-O-methoxyethyl 5-methylcytidine
  misc_feature 1..5: note = RNA
  misc_feature 6..9: note = DNA
  misc_feature 10: note = RNA
  misc_feature 11..14: note = DNA
  misc_feature 15..20: note = RNA
gcagaggtgaagcgaagtgc

SEQ ID NO: 454 - DNA, 16 bp, synthetic construct
  source 1..16: mol_type = other DNA
  modified_base 1: mod_base = OTHER; note = Locked nucleic acid with guanine base
  modified_base 2: mod_base = OTHER; note = Locked nucleic acid with thymine base
  modified_base 3: mod_base = OTHER; note = Locked nucleic acid with cytosine base
  modified_base 8: mod_base = OTHER; note = 2'-deoxy 5-methylcytidine
  modified_base 11: mod_base = OTHER; note = 2'-deoxy 5-methylcytidine
  modified_base 13: mod_base = OTHER; note = 2'-deoxy 5-methylcytidine
  modified_base 14: mod_base = OTHER; note = Locked nucleic acid with thymine base
  modified_base 15: mod_base = OTHER; note = Locked nucleic acid with cytosine base
  modified_base 16: mod_base = OTHER; note = Locked nucleic acid with cytosine base
  misc_feature 1..3: note = RNA
  misc_feature 4..13: note = DNA
  misc_feature 14..16: note = RNA
gtctgtgcatctctcc

SEQ ID NO: 455 - DNA, 20 bp, synthetic construct
  source 1..20: mol_type = other DNA
  modified_base 1: mod_base = OTHER; note = 2'-O-methoxyethyl guanosine
  modified_base 2: mod_base = OTHER; note = 2'-O-methoxyethyl 5-methylcytidine
  modified_base 3: mod_base = OTHER; note = 2'-O-methoxyethyl adenosine
  modified_base 4: mod_base = OTHER; note = 2'-O-methoxyethyl guanosine
  modified_base 10: mod_base = OTHER; note = 2'-O-methoxyethyl adenosine
  modified_base 13: mod_base = OTHER; note = 2'-deoxy 5-methylcytidine
  modified_base 16: mod_base = OTHER; note = 2'-O-methoxyethyl adenosine
  modified_base 17: mod_base = OTHER; note = Locked nucleic acid with guanine base
  modified_base 18: mod_base = OTHER; note = Locked nucleic acid with thymine base
  modified_base 19: mod_base = OTHER; note = 2'-O-methoxyethyl guanosine
  modified_base 20: mod_base = OTHER; note = 2'-O-methoxyethyl 5-methylcytidine
  misc_feature 1..4: note = RNA
  misc_feature 5..9: note = DNA
  misc_feature 10: note = RNA
  misc_feature 11..15: note = DNA
  misc_feature 16..20: note = RNA
gcagaggtgaagcgaagtgc

SEQ ID NO: 456 - DNA, 20 bp, synthetic construct
  source 1..20: mol_type = other DNA
  modified_base 1: mod_base = OTHER; note = 2'-O-methoxyethyl guanosine
  modified_base 2: mod_base = OTHER; note = 2'-O-methoxyethyl 5-methylcytidine
  modified_base 3: mod_base = OTHER; note = 2'-O-methoxyethyl adenosine
  modified_base 4: mod_base = OTHER; note = 2'-O-methoxyethyl guanosine
  modified_base 10: mod_base = OTHER; note = 2'-O-methoxyethyl adenosine
  modified_base 13: mod_base = OTHER; note = 2'-deoxy 5-methylcytidine
  modified_base 16: mod_base = OTHER; note = 2'-O-methoxyethyl adenosine
  modified_base 17: mod_base = OTHER; note = Locked nucleic acid with guanine base
  modified_base 18: mod_base = OTHER; note = 2'-O-methoxyethyl thymidine
  modified_base 19: mod_base = OTHER; note = Locked nucleic acid with guanine base
  modified_base 20: mod_base = OTHER; note = Locked nucleic acid with 5-methylcytidine base
  misc_feature 1..4: note = RNA
  misc_feature 5..9: note = DNA
  misc_feature 10: note = RNA
  misc_feature 11..15: note = DNA
  misc_feature 16..20: note = RNA
gcagaggtgaagcgaagtgc

SEQ ID NO: 457 - DNA, 20 bp, synthetic construct
  source 1..20: mol_type = other DNA
  modified_base 1: mod_base = OTHER; note = 2'-O-methoxyethyl guanosine
  modified_base 2: mod_base = OTHER; note = 2'-O-methoxyethyl 5-methylcytidine
  modified_base 3: mod_base = OTHER; note = 2'-O-methoxyethyl adenosine
  modified_base 4: mod_base = OTHER; note = 2'-O-methoxyethyl guanosine
  modified_base 10: mod_base = OTHER; note = 2'-O-methoxyethyl adenosine
  modified_base 13: mod_base = OTHER; note = 2'-deoxy 5-methylcytidine
  modified_base 16: mod_base = OTHER; note = Locked nucleic acid with adenine base
  modified_base 17: mod_base = OTHER; note = 2'-O-methoxyethyl guanosine
  modified_base 18: mod_base = OTHER; note = 2'-O-methoxyethyl thymidine
  modified_base 19: mod_base = OTHER; note = Locked nucleic acid with guanine base
  modified_base 20: mod_base = OTHER; note = 2'-O-methoxyethyl 5-methylcytidine
  misc_feature 1..4: note = RNA
  misc_feature 5..9: note = DNA
  misc_feature 10: note = RNA
  misc_feature 11..15: note = DNA
  misc_feature 16..20: note = RNA
gcagaggtgaagcgaagtgc

SEQ ID NO: 458 - DNA, 20 bp, synthetic construct
  source 1..20: mol_type = other DNA
  modified_base 1: mod_base = OTHER; note = 2'-O-methoxyethyl guanosine
  modified_base 2: mod_base = OTHER; note = 2'-O-methoxyethyl 5-methylcytidine
  modified_base 3: mod_base = OTHER; note = 2'-O-methoxyethyl adenosine
  modified_base 4: mod_base = OTHER; note = 2'-O-methoxyethyl guanosine
  modified_base 10: mod_base = OTHER; note = 2'-O-methoxyethyl adenosine
  modified_base 13: mod_base = OTHER; note = 2'-deoxy 5-methylcytidine
  modified_base 16: mod_base = OTHER; note = 2'-O-methoxyethyl adenosine
  modified_base 17: mod_base = OTHER; note = Locked nucleic acid with guanine base
  modified_base 18: mod_base = OTHER; note = 2'-O-methoxyethyl thymidine
  modified_base 19: mod_base = OTHER; note = 2'-O-methoxyethyl guanosine
  modified_base 20: mod_base = OTHER; note = Locked nucleic acid with 5-methylcytidine base
  misc_feature 1..4: note = RNA
  misc_feature 5..9: note = DNA
  misc_feature 10: note = RNA
  misc_feature 11..15: note = DNA
  misc_feature 16..20: note = RNA
gcagaggtgaagcgaagtgc

SEQ ID NO: 459 - DNA, 20 bp, synthetic construct
  source 1..20: mol_type = other DNA
  modified_base 1: mod_base = OTHER; note = 2'-O-methoxyethyl guanosine
  modified_base 2: mod_base = OTHER; note = 2'-deoxy 5-methylcytidine
  modified_base 3: mod_base = OTHER; note = 2'-O-methoxyethyl adenosine
  modified_base 4: mod_base = OTHER; note = 2'-O-methoxyethyl guanosine
  modified_base 5: mod_base = OTHER; note = 2'-O-methoxyethyl adenosine
  modified_base 10: mod_base = OTHER; note = 2'-O-methoxyethyl adenosine
  modified_base 13: mod_base = OTHER; note = 2'-deoxy 5-methylcytidine
  modified_base 16: mod_base = OTHER; note = 2'-O-methoxyethyl adenosine
  modified_base 17: mod_base = OTHER; note = Locked nucleic acid with guanine base
  modified_base 18: mod_base = OTHER; note = Locked nucleic acid with thymine base
  modified_base 19: mod_base = OTHER; note = 2'-O-methoxyethyl guanosine
  modified_base 20: mod_base = OTHER; note = 2'-O-methoxyethyl 5-methylcytidine
  misc_feature 1: note = RNA
  misc_feature 2: note = DNA
  misc_feature 3..5: note = RNA
  misc_feature 6..9: note = DNA
  misc_feature 10: note = RNA
  misc_feature 11..15: note = DNA
  misc_feature 16..20: note = RNA
gcagaggtgaagcgaagtgc

SEQ ID NO: 460 - DNA, 20 bp, synthetic construct
  source 1..20: mol_type = other DNA
  modified_base 1: mod_base = OTHER; note = 2'-O-methoxyethyl guanosine
  modified_base 2: mod_base = OTHER; note = 2'-deoxy 5-methylcytidine
  modified_base 3: mod_base = OTHER; note = 2'-O-methoxyethyl adenosine
  modified_base 4: mod_base = OTHER; note = 2'-O-methoxyethyl guanosine
  modified_base 10: mod_base = OTHER; note = 2'-O-methoxyethyl adenosine
  modified_base 13: mod_base = OTHER; note = 2'-deoxy 5-methylcytidine
  modified_base 15: mod_base = OTHER; note = 2'-O-methoxyethyl adenosine
  modified_base 16: mod_base = OTHER; note = 2'-O-methoxyethyl adenosine
  modified_base 17: mod_base = OTHER; note = Locked nucleic acid with guanine base
  modified_base 18: mod_base = OTHER; note = Locked nucleic acid with thymine base
  modified_base 19: mod_base = OTHER; note = 2'-O-methoxyethyl guanosine
  modified_base 20: mod_base = OTHER; note = 2'-O-methoxyethyl 5-methylcytidine
  misc_feature 1: note = RNA
  misc_feature 2: note = DNA
  misc_feature 3..4: note = RNA
  misc_feature 5..9: note = DNA
  misc_feature 10: note = RNA
  misc_feature 11..14: note = DNA
  misc_feature 15..20: note = RNA
gcagaggtgaagcgaagtgc

SEQ ID NO: 461 - DNA, 20 bp, synthetic construct
  source 1..20: mol_type = other DNA
  modified_base 1: mod_base = OTHER; note = 2'-O-methoxyethyl guanosine
  modified_base 2: mod_base = OTHER; note = 2'-deoxy 5-methylcytidine
  modified_base 3: mod_base = OTHER; note = 2'-O-methoxyethyl adenosine
  modified_base 4: mod_base = OTHER; note = 2'-O-methoxyethyl guanosine
  modified_base 5: mod_base = OTHER; note = 2'-O-methoxyethyl adenosine
  modified_base 10: mod_base = OTHER; note = 2'-O-methoxyethyl adenosine
  modified_base 13: mod_base = OTHER; note = 2'-deoxy 5-methylcytidine
  modified_base 15: mod_base = OTHER; note = 2'-O-methoxyethyl adenosine
  modified_base 16: mod_base = OTHER; note = 2'-O-methoxyethyl adenosine
  modified_base 17: mod_base = OTHER; note = Locked nucleic acid with guanine base
  modified_base 18: mod_base = OTHER; note = Locked nucleic acid with thymine base
  modified_base 19: mod_base = OTHER; note = 2'-O-methoxyethyl guanosine
  modified_base 20: mod_base = OTHER; note = 2'-O-methoxyethyl 5-methylcytidine
  misc_feature 1: note = RNA
  misc_feature 2: note = DNA
  misc_feature 3..5: note = RNA
  misc_feature 6..9: note = DNA
  misc_feature 10: note = RNA
  misc_feature 11..14: note = DNA
  misc_feature 15..20: note = RNA
gcagaggtgaagcgaagtgc

SEQ ID NO: 462 - DNA, 20 bp, synthetic construct
  source 1..20: mol_type = other DNA
  modified_base 1: mod_base = OTHER; note = 2'-O-methoxyethyl guanosine
  modified_base 2: mod_base = OTHER; note = 2'-deoxy 5-methylcytidine
  modified_base 3: mod_base = OTHER; note = 2'-O-methoxyethyl adenosine
  modified_base 4: mod_base = OTHER; note = 2'-O-methoxyethyl guanosine
  modified_base 5: mod_base = OTHER; note = 2'-O-methoxyethyl adenosine
  modified_base 10: mod_base = OTHER; note = 2'-O-methoxyethyl adenosine
  modified_base 13: mod_base = OTHER; note = 2'-deoxy 5-methylcytidine
  modified_base 16: mod_base = OTHER; note = 2'-O-methoxyethyl adenosine
  modified_base 17: mod_base = OTHER; note = Locked nucleic acid with guanine base
  modified_base 18: mod_base = OTHER; note = 2'-O-methoxyethyl thymidine
  modified_base 19: mod_base = OTHER; note = 2'-O-methoxyethyl guanosine
  modified_base 20: mod_base = OTHER; note = Locked nucleic acid with 5-methylcytidine base
  misc_feature 1: note = RNA
  misc_feature 2: note = DNA
  misc_feature 3..5: note = RNA
  misc_feature 6..9: note = DNA
  misc_feature 10: note = RNA
  misc_feature 11..15: note = DNA
  misc_feature 16..20: note = RNA
gcagaggtgaagcgaagtgc

SEQ ID NO: 463 - DNA, 20 bp, synthetic construct
  source 1..20: mol_type = other DNA
  modified_base 1: mod_base = OTHER; note = 2'-O-methoxyethyl guanosine
  modified_base 2: mod_base = OTHER; note = 2'-deoxy 5-methylcytidine
  modified_base 3: mod_base = OTHER; note = 2'-O-methoxyethyl adenosine
  modified_base 4: mod_base = OTHER; note = 2'-O-methoxyethyl guanosine
  modified_base 5: mod_base = OTHER; note = 2'-O-methoxyethyl adenosine
  modified_base 10: mod_base = OTHER; note = 2'-O-methoxyethyl adenosine
  modified_base 13: mod_base = OTHER; note = 2'-deoxy 5-methylcytidine
  modified_base 16: mod_base = OTHER; note = Locked nucleic acid with adenine base
  modified_base 17: mod_base = OTHER; note = 2'-O-methoxyethyl guanosine
  modified_base 18: mod_base = OTHER; note = 2'-O-methoxyethyl thymidine
  modified_base 19: mod_base = OTHER; note = Locked nucleic acid with guanine base
  modified_base 20: mod_base = OTHER; note = 2'-O-methoxyethyl 5-methylcytidine
  misc_feature 1: note = RNA
  misc_feature 2: note = DNA
  misc_feature 3..5: note = RNA
  misc_feature 6..9: note = DNA
  misc_feature 10: note = RNA
  misc_feature 11..15: note = DNA
  misc_feature 16..20: note = RNA
gcagaggtgaagcgaagtgc

SEQ ID NO: 464 - DNA, 20 bp, synthetic construct
  source 1..20: mol_type = other DNA
  modified_base 1: mod_base = OTHER; note = 2'-O-methoxyethyl guanosine
  modified_base 2: mod_base = OTHER; note = 2'-O-methoxyethyl 5-methylcytidine
  modified_base 3: mod_base = OTHER; note = 2'-O-methoxyethyl adenosine
  modified_base 5: mod_base = OTHER; note = 2'-O-methoxyethyl adenosine
  modified_base 10: mod_base = OTHER; note = 2'-O-methoxyethyl adenosine
  modified_base 13: mod_base = OTHER; note = 2'-deoxy 5-methylcytidine
  modified_base 16: mod_base = OTHER; note = 2'-O-methoxyethyl adenosine
  modified_base 17: mod_base = OTHER; note = 2'-O-methoxyethyl guanosine
  modified_base 18: mod_base = OTHER; note = 2'-O-methoxyethyl thymidine
  modified_base 19: mod_base = OTHER; note = 2'-O-methoxyethyl guanosine
  modified_base 20: mod_base = OTHER; note = 2'-O-methoxyethyl 5-methylcytidine
  misc_feature 1..3: note = RNA
  misc_feature 4: note = DNA
  misc_feature 5: note = RNA
  misc_feature 6..9: note = DNA
  misc_feature 10: note = RNA
  misc_feature 11..15: note = DNA
  misc_feature 16..20: note = RNA
gcagaggtgaagcgaagtgc

SEQ ID NO: 465 - DNA, 20 bp, synthetic construct
  source 1..20: mol_type = other DNA
  modified_base 1: mod_base = OTHER; note = 2'-O-methoxyethyl guanosine
  modified_base 2: mod_base = OTHER; note = 2'-O-methoxyethyl 5-methylcytidine
  modified_base 3: mod_base = OTHER; note = 2'-O-methoxyethyl adenosine
  modified_base 4: mod_base = OTHER; note = 2'-O-methoxyethyl guanosine
  modified_base 10: mod_base = OTHER; note = 2'-O-methoxyethyl adenosine
  modified_base 13: mod_base = OTHER; note = 2'-deoxy 5-methylcytidine
  modified_base 16: mod_base = OTHER; note = 2'-O-methoxyethyl adenosine
  modified_base 17: mod_base = OTHER; note = Locked nucleic acid with guanine base
  modified_base 18: mod_base = OTHER; note = 2'-O-methoxyethyl thymidine
  modified_base 19: mod_base = OTHER; note = Locked nucleic acid with guanine base
  modified_base 20: mod_base = OTHER; note = Locked nucleic acid with 5-methylcytidine base
  misc_feature 1..4: note = RNA
  misc_feature 5..9: note = DNA
  misc_feature 10: note = RNA
  misc_feature 11..15: note = DNA
  misc_feature 16..20: note = RNA
gcagaggtgaagcgaagtgc

SEQ ID NO: 466 - DNA, 20 bp, synthetic construct
  source 1..20: mol_type = other DNA
  modified_base 1: mod_base = OTHER; note = 2'-O-methoxyethyl adenosine
  modified_base 2: mod_base = OTHER; note = 2'-O-methoxyethyl guanosine
  modified_base 3: mod_base = OTHER; note = 2'-O-methoxyethyl adenosine
  modified_base 4: mod_base = OTHER; note = 2'-O-methoxyethyl guanosine
  modified_base 5: mod_base = OTHER; note = 2'-O-methoxyethyl guanosine
  modified_base 6: mod_base = OTHER; note = 2'-deoxy 5-methylcytidine
  modified_base 14: mod_base = OTHER; note = 2'-deoxy 5-methylcytidine
  modified_base 15: mod_base = OTHER; note = 2'-deoxy 5-methylcytidine
  modified_base 16: mod_base = OTHER; note = 2'-O-methoxyethyl thymidine
  modified_base 17: mod_base = OTHER; note = 2'-O-methoxyethyl adenosine
  modified_base 18: mod_base = OTHER; note = 2'-O-methoxyethyl adenosine
  modified_base 19: mod_base = OTHER; note = 2'-O-methoxyethyl guanosine
  modified_base 20: mod_base = OTHER; note = 2'-O-methoxyethyl guanosine
  misc_feature 1..5: note = RNA
  misc_feature 6..15: note = DNA
  misc_feature 16..20: note = RNA
agaggcaggagtgcctaagg

SEQ ID NO: 467 - DNA, 20 bp, synthetic construct
  source 1..20: mol_type = other DNA
  modified_base 1: mod_base = OTHER; note = 2'-O-methyl 5-methylcytidine
  modified_base 2: mod_base = OTHER; note = 2'-O-methyl 5-methylcytidine
  modified_base 3: mod_base = OTHER; note = 2'-O-methyl guanosine
  modified_base 4: mod_base = OTHER; note = 2'-O-methyl uridine
  modified_base 5: mod_base = OTHER; note = 2'-O-methyl guanosine
  modified_base 8: mod_base = OTHER; note = 2'-deoxy cytidine
  modified_base 10: mod_base = OTHER; note = 2'-deoxy cytidine
  modified_base 13: mod_base = OTHER; note = 2'-deoxy cytidine
  modified_base 15: mod_base = OTHER; note = 2'-deoxy cytidine
  modified_base 16: mod_base = OTHER; note = 2'-O-methyl uridine
  modified_base 17: mod_base = OTHER; note = 2'-O-methyl uridine
  modified_base 18: mod_base = OTHER; note = 2'-O-methyl 5-methylcytidine
  modified_base 19: mod_base = OTHER; note = 2'-O-methyl adenosine
  modified_base 20: mod_base = OTHER; note = 2'-O-methyl 5-methylcytidine
  misc_feature 1..5: note = RNA
  misc_feature 6..15: note = DNA
  misc_feature 16..20: note = RNA
ccgtgtgcacttcgcttcac

SEQ ID NO: 468 - DNA, 20 bp, synthetic construct
  source 1..20: mol_type = other DNA
  modified_base 1: mod_base = OTHER; note = 2'-O-methyl 5-methylcytidine
  modified_base 2: mod_base = OTHER; note = 2'-O-methyl uridine
  modified_base 3: mod_base = OTHER; note = 2'-O-methyl guanosine
  modified_base 4: mod_base = OTHER; note = 2'-O-methyl guanosine
  modified_base 5: mod_base = OTHER; note = 2'-O-methyl 5-methylcytidine
  modified_base 7: mod_base = OTHER; note = 2'-deoxy cytidine
  modified_base 14: mod_base = OTHER; note = 2'-deoxy cytidine
  modified_base 16: mod_base = OTHER; note = 2'-O-methyl adenosine
  modified_base 17: mod_base = OTHER; note = 2'-O-methyl guanosine
  modified_base 18: mod_base = OTHER; note = 2'-O-methyl uridine
  modified_base 19: mod_base = OTHER; note = 2'-O-methyl guanosine
  modified_base 20: mod_base = OTHER; note = 2'-O-methyl 5-methylcytidine
  misc_feature 1..5: note = RNA
  misc_feature 6..15: note = DNA
  misc_feature 16..20: note = RNA
ctggctcagtttactagtgc

SEQ ID NO: 469 - DNA, 19 bp, synthetic construct
  source 1..19: mol_type = other DNA
  modified_base 1: mod_base = OTHER; note = 2'-O-methyl guanosine
  modified_base 2: mod_base = OTHER; note = 2'-O-methyl 5-methylcytidine
  modified_base 3: mod_base = OTHER; note = 2'-O-methyl 5-methylcytidine
  modified_base 4: mod_base = OTHER; note = 2'-O-methyl guanosine
  modified_base 5: mod_base = OTHER; note = 2'-O-methyl adenosine
  modified_base 7: mod_base = OTHER; note = 2'-deoxy cytidine
  modified_base 8: mod_base = OTHER; note = 2'-deoxy cytidine
  modified_base 12: mod_base = OTHER; note = 2'-deoxy cytidine
  modified_base 15: mod_base = OTHER; note = 2'-O-methyl guanosine
  modified_base 16: mod_base = OTHER; note = 2'-O-methyl guanosine
  modified_base 17: mod_base = OTHER; note = 2'-O-methyl adenosine
  modified_base 18: mod_base = OTHER; note = 2'-O-methyl adenosine
  modified_base 19: mod_base = OTHER; note = 2'-O-methyl 5-methylcytidine
  misc_feature 1..5: note = RNA
  misc_feature 6..14: note = DNA
  misc_feature 15..19: note = RNA
gccgatccatactgggaac

SEQ ID NO: 470 - DNA, 20 bp, synthetic construct
  source 1..20: mol_type = other DNA
  modified_base 1: mod_base = OTHER; note = 2'-O-methyl guanosine
  modified_base 2: mod_base = OTHER; note = 2'-O-methyl uridine
  modified_base 3: mod_base = OTHER; note = 2'-O-methyl guanosine
  modified_base 4: mod_base = OTHER; note = 2'-O-methyl guanosine
  modified_base 5: mod_base = OTHER; note = 2'-O-methyl adenosine
  modified_base 6: mod_base = OTHER; note = 2'-deoxy cytidine
  modified_base 9: mod_base = OTHER; note = 2'-deoxy cytidine
  modified_base 11: mod_base = OTHER; note = 2'-deoxy cytidine
  modified_base 13: mod_base = OTHER; note = 2'-deoxy cytidine
  modified_base 16: mod_base = OTHER; note = 2'-O-methyl uridine
  modified_base 17: mod_base = OTHER; note = 2'-O-methyl uridine
  modified_base 18: mod_base = OTHER; note = 2'-O-methyl uridine
  modified_base 19: mod_base = OTHER; note = 2'-O-methyl uridine
  modified_base 20: mod_base = OTHER; note = 2'-O-methyl 5-methylcytidine
  misc_feature 1..5: note = RNA
  misc_feature 6..15: note = DNA
  misc_feature 16..20: note = RNA
gtggacttctctcaattttc

SEQ ID NO: 471 - DNA, 20 bp, synthetic construct
  source 1..20: mol_type = other DNA
  modified_base 1: mod_base = OTHER; note = 2'-O-methyl 5-methylcytidine
  modified_base 2: mod_base = OTHER; note = 2'-O-methyl guanosine
  modified_base 3: mod_base = OTHER; note = 2'-O-methyl 5-methylcytidine
  modified_base 4: mod_base = OTHER; note = 2'-O-methyl uridine
  modified_base 5: mod_base = OTHER; note = 2'-O-methyl guanosine
  modified_base 10: mod_base = OTHER; note = 2'-deoxy cytidine
  modified_base 16: mod_base = OTHER; note = 2'-O-methyl uridine
  modified_base 17: mod_base = OTHER; note = 2'-O-methyl uridine
  modified_base 18: mod_base = OTHER; note = 2'-O-methyl guanosine
  modified_base 19: mod_base = OTHER; note = 2'-O-methyl guanosine
  modified_base 20: mod_base = OTHER; note = 2'-O-methyl uridine
  misc_feature 1..5: note = RNA
  misc_feature 6..15: note = DNA
  misc_feature 16..20: note = RNA
cgctgtaggcataaattggt

SEQ ID NO: 472 - DNA, 20 bp, synthetic construct
  source 1..20: mol_type = other DNA
  modified_base 1: mod_base = OTHER; note = 2'-O-methyl uridine
  modified_base 2: mod_base = OTHER; note = 2'-O-methyl guanosine
  modified_base 3: mod_base = OTHER; note = 2'-O-methyl adenosine
  modified_base 4: mod_base = OTHER; note = 2'-O-methyl 5-methylcytidine
  modified_base 5: mod_base = OTHER; note = 2'-O-methyl adenosine
  modified_base 11: mod_base = OTHER; note = 2'-deoxy cytidine
  modified_base 12: mod_base = OTHER; note = 2'-deoxy cytidine
  modified_base 14: mod_base = OTHER; note = 2'-deoxy cytidine
  modified_base 16: mod_base = OTHER; note = 2'-O-methyl 5-methylcytidine
  modified_base 17: mod_base = OTHER; note = 2'-O-methyl adenosine
  modified_base 18: mod_base = OTHER; note = 2'-O-methyl adenosine
  modified_base 19: mod_base = OTHER; note = 2'-O-methyl uridine
  modified_base 20: mod_base = OTHER; note = 2'-O-methyl adenosine
  misc_feature 1..5: note = RNA
  misc_feature 6..15: note = DNA
  misc_feature 16..20: note = RNA
tgacaagaatcctcacaata

SEQ ID NO: 473 - DNA, 20 bp, synthetic construct
  source 1..20: mol_type = other DNA
  modified_base 1: mod_base = OTHER; note = 2'-O-methyl guanosine
  modified_base 2: mod_base = OTHER; note = 2'-O-methyl adenosine
  modified_base 3: mod_base = OTHER; note = 2'-O-methyl 5-methylcytidine
  modified_base 4: mod_base = OTHER; note = 2'-O-methyl adenosine
  modified_base 5: mod_base = OTHER; note = 2'-O-methyl adenosine
  modified_base 10: mod_base = OTHER; note = 2'-deoxy cytidine
  modified_base 11: mod_base = OTHER; note = 2'-deoxy cytidine
  modified_base 13: mod_base = OTHER; note = 2'-deoxy cytidine
  modified_base 15: mod_base = OTHER; note = 2'-deoxy cytidine
  modified_base 16: mod_base = OTHER; note = 2'-O-methyl adenosine
  modified_base 17: mod_base = OTHER; note = 2'-O-methyl adenosine
  modified_base 18: mod_base = OTHER; note = 2'-O-methyl uridine
  modified_base 19: mod_base = OTHER; note = 2'-O-methyl adenosine
  modified_base 20: mod_base = OTHER; note = 2'-O-methyl 5-methylcytidine
  misc_feature 1..5: note = RNA
  misc_feature 6..15: note = DNA
  misc_feature 16..20: note = RNA
gacaagaatcctcacaatac

SEQ ID NO: 474 - DNA, 16 bp, synthetic construct
  source 1..16: mol_type = other DNA
  modified_base 1: mod_base = OTHER; note = 2'-O-methyl adenosine
  modified_base 2: mod_base = OTHER; note = 2'-O-methyl guanosine
  modified_base 3: mod_base = OTHER; note = 2'-O-methyl 5-methylcytidine
  modified_base 10: mod_base = OTHER; note = 2'-deoxy cytidine
  modified_base 12: mod_base = OTHER; note = 2'-deoxy cytidine
  modified_base 14: mod_base = OTHER; note = 2'-O-methyl 5-methylcytidine
  modified_base 15: mod_base = OTHER; note = 2'-O-methyl guanosine
  modified_base 16: mod_base = OTHER; note = 2'-O-methyl guanosine
  misc_feature 1..3: note = RNA
  misc_feature 4..13: note = DNA
  misc_feature 14..16: note = RNA
agcgaagtgcacacgg

SEQ ID NO: 475 - DNA, 20 bp, synthetic construct
  source 1..20: mol_type = other DNA
  modified_base 1: mod_base = OTHER; note = 2'-O-methyl uridine
  modified_base 2: mod_base = OTHER; note = 2'-O-methyl uridine
  modified_base 3: mod_base = OTHER; note = 2'-O-methyl 5-methylcytidine
  modified_base 4: mod_base = OTHER; note = 2'-O-methyl uridine
  modified_base 5: mod_base = OTHER; note = 2'-O-methyl uridine
  modified_base 6: mod_base = OTHER; note = 2'-deoxy cytidine
  modified_base 9: mod_base = OTHER; note = 2'-deoxy cytidine
  modified_base 16: mod_base = OTHER; note = 2'-O-methyl adenosine
  modified_base 17: mod_base = OTHER; note = 2'-O-methyl 5-methylcytidine
  modified_base 18: mod_base = OTHER; note = 2'-O-methyl 5-methylcytidine
  modified_base 19: mod_base = OTHER; note = 2'-O-methyl uridine
  modified_base 20: mod_base = OTHER; note = 2'-O-methyl guanosine
  misc_feature 1..5: note = RNA
  misc_feature 6..15: note = DNA
  misc_feature 16..20: note = RNA
ttcttcttctaggggacctg

SEQ ID NO: 476 - DNA, 20 bp, synthetic construct
  source 1..20: mol_type = other DNA
  modified_base 1: mod_base = OTHER; note = 2'-O-methyl adenosine
  modified_base 2: mod_base = OTHER; note = 2'-O-methyl 5-methylcytidine
  modified_base 3: mod_base = OTHER; note = 2'-O-methyl adenosine
  modified_base 4: mod_base = OTHER; note = 2'-O-methyl adenosine
  modified_base 5: mod_base = OTHER; note = 2'-O-methyl adenosine
  modified_base 6: mod_base = OTHER; note = 2'-deoxy cytidine
  modified_base 10: mod_base = OTHER; note = 2'-deoxy cytidine
  modified_base 13: mod_base = OTHER; note = 2'-deoxy cytidine
  modified_base 16: mod_base = OTHER; note = 2'-O-methyl adenosine
  modified_base 17: mod_base = OTHER; note = 2'-O-methyl 5-methylcytidine
  modified_base 18: mod_base = OTHER; note = 2'-O-methyl 5-methylcytidine
  modified_base 19: mod_base = OTHER; note = 2'-O-methyl uridine
  modified_base 20: mod_base = OTHER; note = 2'-O-methyl uridine
  misc_feature 1..5: note = RNA
  misc_feature 6..15: note = DNA
  misc_feature 16..20: note = RNA
acaaacgggcaacatacctt

SEQ ID NO: 477 - DNA, 20 bp, synthetic construct
  source 1..20: mol_type = other DNA
  modified_base 1: mod_base = OTHER; note = 2'-O-methyl guanosine
  modified_base 2: mod_base = OTHER; note = 2'-O-methyl guanosine
  modified_base 3: mod_base = OTHER; note = 2'-O-methyl adenosine
  modified_base 4: mod_base = OTHER; note = 2'-O-methyl uridine
  modified_base 5: mod_base = OTHER; note = 2'-O-methyl uridine
  modified_base 6: mod_base = OTHER; note = 2'-deoxy cytidine
  modified_base 9: mod_base = OTHER; note = 2'-deoxy cytidine
  modified_base 11: mod_base = OTHER; note = 2'-deoxy cytidine
  modified_base 12: mod_base = OTHER; note = 2'-deoxy cytidine
  modified_base 15: mod_base = OTHER; note = 2'-deoxy cytidine
  modified_base 16: mod_base = OTHER; note = 2'-O-methyl guanosine
  modified_base 17: mod_base = OTHER; note = 2'-O-methyl guanosine
  modified_base 18: mod_base = OTHER; note = 2'-O-methyl guanosine
  modified_base 19: mod_base = OTHER; note = 2'-O-methyl adenosine
  modified_base 20: mod_base = OTHER; note = 2'-O-methyl 5-methylcytidine
  misc_feature 1..5: note = RNA
  misc_feature 6..15: note = DNA
  misc_feature 16..20: note = RNA
ggattcagcgccgacgggac

SEQ ID NO: 478 - DNA, 19 bp, synthetic construct
  source 1..19: mol_type = other DNA
  modified_base 1: mod_base = OTHER; note = 2'-O-methyl 5-methylcytidine
  modified_base 2: mod_base = OTHER; note = 2'-O-methyl guanosine
  modified_base 3: mod_base = OTHER; note = 2'-O-methyl uridine
  modified_base 4: mod_base = OTHER; note = 2'-O-methyl guanosine
  modified_base 5: mod_base = OTHER; note = 2'-O-methyl guanosine
  modified_base 10: mod_base = OTHER; note = 2'-deoxy cytidine
  modified_base 13: mod_base = OTHER; note = 2'-deoxy cytidine
  modified_base 15: mod_base = OTHER; note = 2'-O-methyl 5-methylcytidine
  modified_base 16: mod_base = OTHER; note = 2'-O-methyl uridine
  modified_base 17: mod_base = OTHER; note = 2'-O-methyl 5-methylcytidine
  modified_base 18: mod_base = OTHER; note = 2'-O-methyl adenosine
  modified_base 19: mod_base = OTHER; note = 2'-O-methyl adenosine
  misc_feature 1..5: note = RNA
  misc_feature 6..14: note = DNA
  misc_feature 15..19: note = RNA
cgtggtggacttctctcaa

SEQ ID NO: 479 - DNA, 20 bp, synthetic construct
  source 1..20: mol_type = other DNA
  modified_base 1: mod_base = OTHER; note = 2'-O-methyl 5-methylcytidine
  modified_base 2: mod_base = OTHER; note = 2'-O-methyl 5-methylcytidine
  modified_base 3: mod_base = OTHER; note = 2'-O-methyl uridine
  modified_base 4: mod_base = OTHER; note = 2'-O-methyl uridine
  modified_base 5: mod_base = OTHER; note = 2'-O-methyl 5-methylcytidine
  modified_base 6: mod_base = OTHER; note = 2'-deoxy cytidine
  modified_base 7: mod_base = OTHER; note = 2'-deoxy cytidine
  modified_base 16: mod_base = OTHER; note = 2'-O-methyl 5-methylcytidine
  modified_base 17: mod_base = OTHER; note = 2'-O-methyl 5-methylcytidine
  modified_base 18: mod_base = OTHER; note = 2'-O-methyl uridine
  modified_base 19: mod_base = OTHER; note = 2'-O-methyl 5-methylcytidine
  modified_base 20: mod_base = OTHER; note = 2'-O-methyl 5-methylcytidine
  misc_feature 1..5: note = RNA
  misc_feature 6..15: note = DNA
  misc_feature 16..20: note = RNA
ccttccctgaaggttcctcc

SEQ ID NO: 480 - DNA, 19 bp, synthetic construct
  source 1..19: mol_type = other DNA
  modified_base 1: mod_base = OTHER; note = 2'-O-methyl 5-methylcytidine
  modified_base 2: mod_base = OTHER; note = 2'-O-methyl adenosine
  modified_base 3: mod_base = OTHER; note = 2'-O-methyl 5-methylcytidine
  modified_base 4: mod_base = OTHER; note = 2'-O-methyl thymidine
  modified_base 5: mod_base = OTHER; note = 2'-O-methyl adenosine
  modified_base 11: mod_base = OTHER; note = 2'-deoxy cytidine
  modified_base 15: mod_base = OTHER; note = 2'-O-methyl guanosine
  modified_base 16: mod_base = OTHER; note = 2'-O-methyl 5-methylcytidine
  modified_base 17: mod_base = OTHER; note = 2'-O-methyl 5-methylcytidine
  modified_base 18: mod_base = OTHER; note = 2'-O-methyl adenosine
  modified_base 19: mod_base = OTHER; note = 2'-O-methyl guanosine
  misc_feature 1..5: note = RNA
  misc_feature 6..14: note = DNA
  misc_feature 15..19: note = RNA
cactagtaaactgagccag

SEQ ID NO: 481 - DNA, 19 bp, synthetic construct
  source 1..19: mol_type = other DNA
  modified_base 1: mod_base = OTHER; note = 2'-O-methyl thymidine
  modified_base 2: mod_base = OTHER; note = 2'-O-methyl thymidine
  modified_base 3: mod_base = OTHER; note = 2'-O-methyl 5-methylcytidine
  modified_base 4: mod_base = OTHER; note = 2'-O-methyl 5-methylcytidine
  modified_base 5: mod_base = OTHER; note = 2'-O-methyl guanosine
  modified_base 6: mod_base = OTHER; note = 2'-deoxy cytidine
  modified_base 15: mod_base = OTHER; note = 2'-O-methyl thymidine
  modified_base 16: mod_base = OTHER; note = 2'-O-methyl 5-methylcytidine
  modified_base 17: mod_base = OTHER; note = 2'-O-methyl guanosine
  modified_base 18: mod_base = OTHER; note = 2'-O-methyl guanosine
  modified_base 19: mod_base = OTHER; note = 2'-O-methyl 5-methylcytidine
  misc_feature 1..5: note = RNA
  misc_feature 6..14: note = DNA
  misc_feature 15..19: note = RNA
ttccgcagtatggatcggc

SEQ ID NO: 482 - DNA, 21 bp, synthetic construct
  source 1..21: mol_type = other DNA
  modified_base 1: mod_base = OTHER; note = 2'-O-methyl adenosine
  modified_base 2: mod_base = OTHER; note = 2'-O-methyl guanosine
  modified_base 3: mod_base = OTHER; note = 2'-O-methyl adenosine
  modified_base 4: mod_base = OTHER; note = 2'-O-methyl adenosine
  modified_base 5: mod_base = OTHER; note = 2'-O-methyl adenosine
  modified_base 17: mod_base = OTHER; note = 2'-O-methyl thymidine
  modified_base 18: mod_base = OTHER; note = 2'-O-methyl 5-methylcytidine
  modified_base 19: mod_base = OTHER; note = 2'-O-methyl 5-methylcytidine
  modified_base 20: mod_base = OTHER; note = 2'-O-methyl adenosine
  modified_base 21: mod_base = OTHER; note = 2'-O-methyl 5-methylcytidine
  misc_feature 1..5: note = RNA
  misc_feature 6..16: note = DNA
  misc_feature 17..21: note = RNA
agaaaattgagagaagtccac

SEQ ID NO: 483 - DNA, 19 bp, synthetic construct
  source 1..19: mol_type = other DNA
  modified_base 1: mod_base = OTHER; note = 2'-O-methyl adenosine
  modified_base 2: mod_base = OTHER; note = 2'-O-methyl 5-methylcytidine
  modified_base 3: mod_base = OTHER; note = 2'-O-methyl 5-methylcytidine
  modified_base 4: mod_base = OTHER; note = 2'-O-methyl adenosine
  modified_base 5: mod_base = OTHER; note = 2'-O-methyl adenosine
  modified_base 12: mod_base = OTHER; note = 2'-deoxy cytidine
  modified_base 13: mod_base = OTHER; note = 2'-deoxy cytidine
  modified_base 15: mod_base = OTHER; note = 2'-O-methyl adenosine
  modified_base 16: mod_base = OTHER; note = 2'-O-methyl 5-methylcytidine
  modified_base 17: mod_base = OTHER; note = 2'-O-methyl adenosine
  modified_base 18: mod_base = OTHER; note = 2'-O-methyl guanosine
  modified_base 19: mod_base = OTHER; note = 2'-O-methyl 5-methylcytidine
  misc_feature 1..5: note = RNA
  misc_feature 6..14: note = DNA
  misc_feature 15..19: note = RNA
accaatttatgcctacagc

SEQ ID NO: 484 - DNA, 20 bp, synthetic construct
  source 1..20: mol_type = other DNA
  modified_base 1: mod_base = OTHER; note = 2'-O-methyl thymidine
  modified_base 2: mod_base = OTHER; note = 2'-O-methyl adenosine
  modified_base 3: mod_base = OTHER; note = 2'-O-methyl thymidine
  modified_base 4: mod_base = OTHER; note = 2'-O-methyl thymidine
  modified_base 5: mod_base = OTHER; note = 2'-O-methyl guanosine
  modified_base 14: mod_base = OTHER; note = 2'-deoxy cytidine
  modified_base 16: mod_base = OTHER; note = 2'-O-methyl thymidine
  modified_base 17: mod_base = OTHER; note = 2'-O-methyl guanosine
  modified_base 18: mod_base = OTHER; note = 2'-O-methyl thymidine
  modified_base 19: mod_base = OTHER; note = 2'-O-methyl 5-methylcytidine
  modified_base 20: mod_base = OTHER; note = 2'-O-methyl adenosine
  misc_feature 1..5: note = RNA
  misc_feature 6..15: note = DNA
  misc_feature 16..20: note = RNA
tattgtgaggattcttgtca

SEQ ID NO: 485 - DNA, 20 bp, synthetic construct
  source 1..20: mol_type = other DNA
  modified_base 1: mod_base = OTHER; note = 2'-O-methyl guanosine
  modified_base 2: mod_base = OTHER; note = 2'-O-methyl thymidine
  modified_base 3: mod_base = OTHER; note = 2'-O-methyl adenosine
  modified_base 4: mod_base = OTHER; note = 2'-O-methyl thymidine
  modified_base 5: mod_base = OTHER; note = 2'-O-methyl thymidine
  modified_base 15: mod_base = OTHER; note = 2'-deoxy cytidine
  modified_base 16: mod_base = OTHER; note = 2'-O-methyl thymidine
  modified_base 17: mod_base = OTHER; note = 2'-O-methyl thymidine
  modified_base 18: mod_base = OTHER; note = 2'-O-methyl guanosine
  modified_base 19: mod_base = OTHER; note = 2'-O-methyl thymidine
  modified_base 20: mod_base = OTHER; note = 2'-O-methyl 5-methylcytidine
  misc_feature 1..5: note = RNA
  misc_feature 6..15: note = DNA
  misc_feature 16..20: note = RNA
gtattgtgaggattcttgtc

SEQ ID NO: 486 - DNA, 20 bp, synthetic construct
  source 1..20: mol_type = other DNA
  modified_base 1: mod_base = OTHER; note = 2'-O-methyl 5-methylcytidine
  modified_base 2: mod_base = OTHER; note = 2'-O-methyl 5-methylcytidine
  modified_base 3: mod_base = OTHER; note = 2'-O-methyl thymidine
  modified_base 4: mod_base = OTHER; note = 2'-O-methyl thymidine
  modified_base 5: mod_base = OTHER; note = 2'-O-methyl 5-methylcytidine
  modified_base 6: mod_base = OTHER; note = 2'-deoxy cytidine
  modified_base 7: mod_base = OTHER; note = 2'-deoxy cytidine
  modified_base 16: mod_base = OTHER; note = 2'-O-methyl 5-methylcytidine
  modified_base 17: mod_base = OTHER; note = 2'-O-methyl 5-methylcytidine
  modified_base 18: mod_base = OTHER; note = 2'-O-methyl thymidine
  modified_base 19: mod_base = OTHER; note = 2'-O-methyl 5-methylcytidine
  modified_base 20: mod_base = OTHER; note = 2'-O-methyl 5-methylcytidine
  misc_feature 1..5: note = RNA
  misc_feature 6..15: note = DNA
  misc_feature 16..20: note = RNA
ccttccctgaaggttcctcc

SEQ ID NO: 487 - DNA, 20 bp, synthetic construct
  source 1..20: mol_type = other DNA
  modified_base 1: mod_base = OTHER; note = 2'-O-methyl thymidine
  modified_base 2: mod_base = OTHER; note = 2'-O-methyl thymidine
  modified_base 3: mod_base = OTHER; note = 2'-O-methyl 5-methylcytidine
  modified_base 4: mod_base = OTHER; note = 2'-O-methyl thymidine
  modified_base 5: mod_base = OTHER; note = 2'-O-methyl thymidine
  modified_base 6: mod_base = OTHER; note = 2'-deoxy cytidine
  modified_base 9: mod_base = OTHER; note = 2'-deoxy cytidine
  modified_base 16: mod_base = OTHER; note = 2'-O-methyl adenosine
  modified_base 17: mod_base = OTHER; note = 2'-O-methyl 5-methylcytidine
  modified_base 18: mod_base = OTHER; note = 2'-O-methyl 5-methylcytidine
  modified_base 19: mod_base = OTHER; note = 2'-O-methyl thymidine
  modified_base 20: mod_base = OTHER; note = 2'-O-methyl guanosine
  misc_feature 1..5: note = RNA
  misc_feature 6..15: note = DNA
  misc_feature 16..20: note = RNA
ttcttcttctaggggacctg

SEQ ID NO: 488 - DNA, 20 bp, synthetic construct
  source 1..20: mol_type = other DNA
  modified_base 1: mod_base = OTHER; note = 2'-O-methyl adenosine
  modified_base 2: mod_base = OTHER; note = 2'-O-methyl 5-methylcytidine
  modified_base 3: mod_base = OTHER; note = 2'-O-methyl adenosine
  modified_base 4: mod_base = OTHER; note = 2'-O-methyl adenosine
  modified_base 5: mod_base = OTHER; note = 2'-O-methyl adenosine
  modified_base 6: mod_base = OTHER; note = 2'-deoxy cytidine
  modified_base 10: mod_base = OTHER; note = 2'-deoxy cytidine
  modified_base 13: mod_base = OTHER; note = 2'-deoxy cytidine
  modified_base 16: mod_base = OTHER; note = 2'-O-methyl adenosine
  modified_base 17: mod_base = OTHER; note = 2'-O-methyl 5-methylcytidine
  modified_base 18: mod_base = OTHER; note = 2'-O-methyl 5-methylcytidine
  modified_base 19: mod_base = OTHER; note = 2'-O-methyl thymidine
  modified_base 20: mod_base = OTHER; note = 2'-O-methyl thymidine
  misc_feature 1..5: note = RNA
  misc_feature 6..15: note = DNA
  misc_feature 16..20: note = RNA
acaaacgggcaacatacctt

SEQ ID NO: 489 - DNA, 20 bp, synthetic construct
  source 1..20: mol_type = other DNA
  modified_base 1: mod_base = OTHER; note = 2'-O-methyl guanosine
  modified_base 2: mod_base = OTHER; note = 2'-O-methyl guanosine
  modified_base 3: mod_base = OTHER; note = 2'-O-methyl adenosine
  modified_base 4: mod_base = OTHER; note = 2'-O-methyl thymidine
  modified_base 5: mod_base = OTHER; note = 2'-O-methyl thymidine
  modified_base 6: mod_base = OTHER; note = 2'-deoxy cytidine
  modified_base 9: mod_base = OTHER; note = 2'-deoxy cytidine
  modified_base 11: mod_base = OTHER; note = 2'-deoxy cytidine
  modified_base 12: mod_base = OTHER; note = 2'-deoxy cytidine
  modified_base 15: mod_base = OTHER; note = 2'-deoxy cytidine
  modified_base 16: mod_base = OTHER; note = 2'-O-methyl guanosine
  modified_base 17: mod_base = OTHER; note = 2'-O-methyl guanosine
  modified_base 18: mod_base = OTHER; note = 2'-O-methyl guanosine
  modified_base 19: mod_base = OTHER; note = 2'-O-methyl adenosine
  modified_base 20: mod_base = OTHER; note = 2'-O-methyl 5-methylcytidine
  misc_feature 1..5: note = RNA
  misc_feature 6..15: note = DNA
  misc_feature 16..20: note = RNA
ggattcagcgccgacgggac

SEQ ID NO: 490 - DNA, 20 bp, synthetic construct
  source 1..20: mol_type = other DNA
  modified_base 1: mod_base = OTHER; note = 2'-O-methyl adenosine
  modified_base 2: mod_base = OTHER; note = 2'-O-methyl thymidine
  modified_base 3: mod_base = OTHER; note = 2'-O-methyl thymidine
  modified_base 4: mod_base = OTHER; note = 2'-O-methyl guanosine
  modified_base 5: mod_base = OTHER; note = 2'-O-methyl adenosine
  modified_base 13: mod_base = OTHER; note = 2'-deoxy cytidine
  modified_base 14: mod_base = OTHER; note = 2'-deoxy cytidine
  modified_base 16: mod_base = OTHER; note = 2'-O-methyl 5-methylcytidine
  modified_base 17: mod_base = OTHER; note = 2'-O-methyl 5-methylcytidine
  modified_base 18: mod_base = OTHER; note = 2'-O-methyl adenosine
  modified_base 19: mod_base = OTHER; note = 2'-O-methyl 5-methylcytidine
  modified_base 20: mod_base = OTHER; note = 2'-O-methyl guanosine
  misc_feature 1..5: note = RNA
  misc_feature 6..15: note = DNA
  misc_feature 16..20: note = RNA
attgagagaagtccaccacg

SEQ ID NO: 491 - DNA, 20 bp, synthetic construct
  source 1..20: mol_type = other DNA
  modified_base 1: mod_base = OTHER; note = 2'-O-methoxyethyl adenosine
  modified_base 2: mod_base = OTHER; note = 2'-O-methoxyethyl guanosine
  modified_base 3: mod_base = OTHER; note = 2'-O-methoxyethyl adenosine
  modified_base 4: mod_base = OTHER; note = 2'-O-methoxyethyl adenosine
  modified_base 5: mod_base = OTHER; note = 2'-O-methoxyethyl adenosine
  modified_base 16: mod_base = OTHER; note = 2'-O-methoxyethyl guanosine
  modified_base 17: mod_base = OTHER; note = 2'-O-methoxyethyl thymidine
  modified_base 18: mod_base = OTHER; note = 2'-O-methoxyethyl 5-methylcytidine
  modified_base 19: mod_base = OTHER; note = 2'-O-methoxyethyl 5-methylcytidine
  modified_base 20: mod_base = OTHER; note = 2'-O-methoxyethyl adenosine
  misc_feature 1..5: note = RNA
  misc_feature 6..15: note = DNA
  misc_feature 16..20: note = RNA
agaaaattgagagaagtcca

SEQ ID NO: 492 - DNA, 20 bp, synthetic construct
  source 1..20: mol_type = other DNA
  modified_base 1: mod_base = OTHER; note = 2'-O-methoxyethyl guanosine
  modified_base 2: mod_base = OTHER; note = 2'-O-methoxyethyl adenosine
  modified_base 3: mod_base = OTHER; note = 2'-O-methoxyethyl adenosine
  modified_base 4: mod_base = OTHER; note = 2'-O-methoxyethyl adenosine
  modified_base 5: mod_base = OTHER; note = 2'-O-methoxyethyl adenosine
  modified_base 16: mod_base = OTHER; note = 2'-O-methoxyethyl thymidine
  modified_base 17: mod_base = OTHER; note = 2'-O-methoxyethyl 5-methylcytidine
  modified_base 18: mod_base = OTHER; note = 2'-O-methoxyethyl 5-methylcytidine
  modified_base 19: mod_base = OTHER; note = 2'-O-methoxyethyl adenosine
  modified_base 20: mod_base = OTHER; note = 2'-O-methoxyethyl 5-methylcytidine
  misc_feature 1..5: note = RNA
  misc_feature 6..15: note = DNA
  misc_feature 16..20: note = RNA
gaaaattgagagaagtccac

SEQ ID NO: 493 - DNA, 20 bp, synthetic construct
  source 1..20: mol_type = other DNA
  modified_base 1: mod_base = OTHER; note = 2'-O-methoxyethyl adenosine
  modified_base 2: mod_base = OTHER; note = 2'-O-methoxyethyl adenosine
  modified_base 3: mod_base = OTHER; note = 2'-O-methoxyethyl adenosine
  modified_base 4: mod_base = OTHER; note = 2'-O-methoxyethyl adenosine
  modified_base 5: mod_base = OTHER; note = 2'-O-methoxyethyl thymidine
  modified_base 16: mod_base = OTHER; note = 2'-O-methoxyethyl 5-methylcytidine
  modified_base 17: mod_base = OTHER; note = 2'-O-methoxyethyl 5-methylcytidine
  modified_base 18: mod_base = OTHER; note = 2'-O-methoxyethyl adenosine
  modified_base 19: mod_base = OTHER; note = 2'-O-methoxyethyl 5-methylcytidine
  modified_base 20: mod_base = OTHER; note = 2'-O-methoxyethyl 5-methylcytidine
  misc_feature 1..5: note = RNA
  misc_feature 6..15: note = DNA
  misc_feature 16..20: note = RNA
aaaattgagagaagtccacc

SEQ ID NO: 494 - DNA, 20 bp, synthetic construct
  source 1..20: mol_type = other DNA
  modified_base 1: mod_base = OTHER; note = 2'-O-methoxyethyl adenosine
  modified_base 2: mod_base = OTHER; note = 2'-O-methoxyethyl adenosine
  modified_base 3: mod_base = OTHER; note = 2'-O-methoxyethyl adenosine
  modified_base 4: mod_base = OTHER; note = 2'-O-methoxyethyl thymidine
  modified_base 5: mod_base = OTHER; note = 2'-O-methoxyethyl thymidine
  modified_base 15: mod_base = OTHER; note = 2'-deoxy 5-methylcytidine
  modified_base 16: mod_base = OTHER; note = 2'-O-methoxyethyl 5-methylcytidine
  modified_base 17: mod_base = OTHER; note = 2'-O-methoxyethyl adenosine
  modified_base 18: mod_base = OTHER; note = 2'-O-methoxyethyl 5-methylcytidine
  modified_base 19: mod_base = OTHER; note = 2'-O-methoxyethyl 5-methylcytidine
  modified_base 20: mod_base = OTHER; note = 2'-O-methoxyethyl adenosine
  misc_feature 1..5: note = RNA
  misc_feature 6..15: note = DNA
  misc_feature 16..20: note = RNA
aaattgagagaagtccacca

SEQ ID NO: 495 - DNA, 20 bp, synthetic construct
  source 1..20: mol_type = other DNA
  modified_base 1: mod_base = OTHER; note = 2'-O-methoxyethyl adenosine
  modified_base 2: mod_base = OTHER; note = 2'-O-methoxyethyl adenosine
  modified_base 3: mod_base = OTHER; note = 2'-O-methoxyethyl thymidine
  modified_base 4: mod_base = OTHER; note = 2'-O-methoxyethyl thymidine
  modified_base 5: mod_base = OTHER; note = 2'-O-methoxyethyl guanosine
  modified_base 14: mod_base = OTHER; note = 2'-deoxy 5-methylcytidine
  modified_base 15: mod_base = OTHER; note = 2'-deoxy 5-methylcytidine
  modified_base 16: mod_base = OTHER; note = 2'-O-methoxyethyl adenosine
  modified_base 17: mod_base = OTHER; note = 2'-O-methoxyethyl 5-methylcytidine
  modified_base 18: mod_base = OTHER; note = 2'-O-methoxyethyl 5-methylcytidine
  modified_base 19: mod_base = OTHER; note = 2'-O-methoxyethyl adenosine
  modified_base 20: mod_base = OTHER; note = 2'-O-methoxyethyl 5-methylcytidine
  misc_feature 1..5: note = RNA
  misc_feature 6..15: note = DNA
  misc_feature 16..20: note = RNA
aattgagagaagtccaccac

SEQ ID NO: 496 - DNA, 20 bp, synthetic construct
  source 1..20: mol_type = other DNA
  modified_base 1: mod_base = OTHER; note = 2'-O-methoxyethyl adenosine
  modified_base 2: mod_base = OTHER; note = 2'-O-methoxyethyl thymidine
  modified_base 3: mod_base = OTHER; note = 2'-O-methoxyethyl thymidine
  modified_base 4: mod_base = OTHER; note = 2'-O-methoxyethyl guanosine
  modified_base 5: mod_base = OTHER; note = 2'-O-methoxyethyl adenosine
  modified_base 13: mod_base = OTHER; note = 2'-deoxy 5-methylcytidine
  modified_base 14: mod_base = OTHER; note = 2'-deoxy 5-methylcytidine
  modified_base 16: mod_base = OTHER; note = 2'-O-methoxyethyl 5-methylcytidine
  modified_base 17: mod_base = OTHER; note = 2'-O-methoxyethyl 5-methylcytidine
  modified_base 18: mod_base = OTHER; note = 2'-O-methoxyethyl adenosine
  modified_base 19: mod_base = OTHER; note = 2'-O-methoxyethyl 5-methylcytidine
  modified_base 20: mod_base = OTHER; note = 2'-O-methoxyethyl guanosine
  misc_feature 1..5: note = RNA
  misc_feature 6..15: note = DNA
  misc_feature 16..20: note = RNA
attgagagaagtccaccacg

SEQ ID NO: 497 - DNA, 20 bp, synthetic construct
  source 1..20: mol_type = other DNA
  modified_base 1: mod_base = OTHER; note = 2'-O-methoxyethyl 5-methylcytidine
  modified_base 2: mod_base = OTHER; note = 2'-O-methoxyethyl adenosine
  modified_base 3: mod_base = OTHER; note = 2'-O-methoxyethyl guanosine
  modified_base 4: mod_base = OTHER; note = 2'-O-methoxyethyl adenosine
  modified_base 5: mod_base = OTHER; note = 2'-O-methoxyethyl guanosine
  modified_base 12: mod_base = OTHER; note = 2'-deoxy 5-methylcytidine
  modified_base 16: mod_base = OTHER; note = 2'-O-methoxyethyl guanosine
  modified_base 17: mod_base = OTHER; note = 2'-O-methoxyethyl thymidine
  modified_base 18: mod_base = OTHER; note = 2'-O-methoxyethyl guanosine
  modified_base 19: mod_base = OTHER; note = 2'-O-methoxyethyl 5-methylcytidine
  modified_base 20: mod_base = OTHER; note = 2'-O-methoxyethyl adenosine
  misc_feature 1..5: note = RNA
  misc_feature 6..15: note = DNA
  misc_feature 16..20: note = RNA
cagaggtgaagcgaagtgca

SEQ ID NO: 498 - DNA, 20 bp, synthetic construct
  source 1..20: mol_type = other DNA
  modified_base 1: mod_base = OTHER; note = 2'-O-methoxyethyl adenosine
  modified_base 2: mod_base = OTHER; note = 2'-O-methoxyethyl guanosine
  modified_base 3: mod_base = OTHER; note = 2'-O-methoxyethyl adenosine
  modified_base 4: mod_base = OTHER; note = 2'-O-methoxyethyl guanosine
  modified_base 5: mod_base = OTHER; note = 2'-O-methoxyethyl guanosine
  modified_base 11: mod_base = OTHER; note = 2'-deoxy 5-methylcytidine
  modified_base 16: mod_base = OTHER; note = 2'-O-methoxyethyl thymidine
  modified_base 17: mod_base = OTHER; note = 2'-O-methoxyethyl guanosine
  modified_base 18: mod_base = OTHER; note = 2'-O-methoxyethyl 5-methylcytidine
  modified_base 19: mod_base = OTHER; note = 2'-O-methoxyethyl adenosine
  modified_base 20: mod_base = OTHER; note = 2'-O-methoxyethyl 5-methylcytidine
  misc_feature 1..5: note = RNA
  misc_feature 6..15: note = DNA
  misc_feature 16..20: note = RNA
agaggtgaagcgaagtgcac

SEQ ID NO: 499 - DNA, 20 bp, synthetic construct
  source 1..20: mol_type = other DNA
  modified_base 1: mod_base = OTHER; note = 2'-O-methoxyethyl guanosine
  modified_base 2: mod_base = OTHER; note = 2'-O-methoxyethyl adenosine
  modified_base 3: mod_base = OTHER; note = 2'-O-methoxyethyl guanosine
  modified_base 4: mod_base = OTHER; note = 2'-O-methoxyethyl guanosine
  modified_base 5: mod_base = OTHER; note = 2'-O-methoxyethyl thymidine
  modified_base 10: mod_base = OTHER; note = 2'-deoxy 5-methylcytidine
  modified_base 16: mod_base = OTHER; note = 2'-O-methoxyethyl guanosine
  modified_base 17: mod_base = OTHER; note = 2'-O-methoxyethyl 5-methylcytidine
  modified_base 18: mod_base = OTHER; note = 2'-O-methoxyethyl adenosine
  modified_base 19: mod_base = OTHER; note = 2'-O-methoxyethyl 5-methylcytidine
  modified_base 20: mod_base = OTHER; note = 2'-O-methoxyethyl adenosine
  misc_feature 1..5: note = RNA
  misc_feature 6..15: note = DNA
  misc_feature 16..20: note = RNA
gaggtgaagcgaagtgcaca

SEQ ID NO: 500 - DNA, 20 bp, synthetic construct
  source 1..20: mol_type = other DNA
  modified_base 1: mod_base = OTHER; note = 2'-O-methoxyethyl adenosine
  modified_base 2: mod_base = OTHER; note = 2'-O-methoxyethyl guanosine
  modified_base 3: mod_base = OTHER; note = 2'-O-methoxyethyl guanosine
  modified_base 4: mod_base = OTHER; note = 2'-O-methoxyethyl thymidine
  modified_base 5: mod_base = OTHER; note = 2'-O-methoxyethyl guanosine
  modified_base 9: mod_base = OTHER; note = 2'-deoxy 5-methylcytidine
  modified_base 16: mod_base = OTHER; note = 2'-O-methoxyethyl 5-methylcytidine
  modified_base 17: mod_base = OTHER; note = 2'-O-methoxyethyl adenosine
  modified_base 18: mod_base = OTHER; note = 2'-O-methoxyethyl 5-methylcytidine
  modified_base 19: mod_base = OTHER; note = 2'-O-methoxyethyl adenosine
  modified_base 20: mod_base = OTHER; note = 2'-O-methoxyethyl 5-methylcytidine
  misc_feature 1..5: note = RNA
  misc_feature 6..15: note = DNA
  misc_feature 16..20: note = RNA
aggtgaagcgaagtgcacac

SEQ ID NO: 501 - DNA, 20 bp, synthetic construct
  source 1..20: mol_type = other DNA
  modified_base 1: mod_base = OTHER; note = 2'-O-methoxyethyl guanosine
  modified_base 2: mod_base = OTHER; note = 2'-O-methoxyethyl guanosine
  modified_base 3: mod_base = OTHER; note = 2'-O-methoxyethyl thymidine
  modified_base 4: mod_base = OTHER; note = 2'-O-methoxyethyl guanosine
  modified_base 5: mod_base = OTHER; note = 2'-O-methoxyethyl adenosine
  modified_base 8: mod_base = OTHER; note = 2'-deoxy 5-methylcytidine
  modified_base 15: mod_base = OTHER; note = 2'-deoxy 5-methylcytidine
  modified_base 16: mod_base = OTHER; note = 2'-O-methoxyethyl adenosine
  modified_base 17: mod_base = OTHER; note = 2'-O-methoxyethyl 5-methylcytidine
  modified_base 18: mod_base = OTHER; note = 2'-O-methoxyethyl adenosine
  modified_base 19: mod_base = OTHER; note = 2'-O-methoxyethyl 5-methylcytidine
  modified_base 20: mod_base = OTHER; note = 2'-O-methoxyethyl guanosine
  misc_feature 1..5: note = RNA
  misc_feature 6..15: note = DNA
  misc_feature 16..20: note = RNA
ggtgaagcgaagtgcacacg

SEQ ID NO: 502 - DNA, 20 bp, synthetic construct
  source 1..20: mol_type = other DNA
  modified_base 1: mod_base = OTHER; note = 2'-O-methoxyethyl guanosine
  modified_base 2: mod_base = OTHER; note = 2'-O-methoxyethyl thymidine
  modified_base 3: mod_base = OTHER; note = 2'-O-methoxyethyl guanosine
  modified_base 4: mod_base = OTHER; note = 2'-O-methoxyethyl adenosine
  modified_base 5: mod_base = OTHER; note = 2'-O-methoxyethyl adenosine
  modified_base 7: mod_base = OTHER; note = 2'-deoxy 5-methylcytidine
  modified_base 14: mod_base = OTHER; note = 2'-deoxy 5-methylcytidine
  modified_base 16: mod_base = OTHER; note = 2'-O-methoxyethyl 5-methylcytidine
  modified_base 17: mod_base = OTHER; note = 2'-O-methoxyethyl adenosine
  modified_base 18: mod_base = OTHER; note = 2'-O-methoxyethyl 5-methylcytidine
  modified_base 19: mod_base = OTHER; note = 2'-O-methoxyethyl guanosine
  modified_base 20: mod_base = OTHER; note = 2'-O-methoxyethyl guanosine
  misc_feature 1..5: note = RNA
  misc_feature 6..15: note = DNA
  misc_feature 16..20: note = RNA
gtgaagcgaagtgcacacgg

SEQ ID NO: 503 - DNA, 20 bp, synthetic construct
  source 1..20: mol_type = other DNA
  modified_base 1: mod_base = OTHER; note = 2'-O-methoxyethyl guanosine
  modified_base 2: mod_base = OTHER; note = 2'-O-methoxyethyl 5-methylcytidine
  modified_base 3: mod_base = OTHER; note = 2'-O-methoxyethyl adenosine
  modified_base 4: mod_base = OTHER; note = 2'-O-methoxyethyl 5-methylcytidine
  modified_base 5: mod_base = OTHER; note = 2'-O-methoxyethyl thymidine
  modified_base 12: mod_base = OTHER; note = 2'-deoxy 5-methylcytidine
  modified_base 16: mod_base = OTHER; note = 2'-O-methoxyethyl guanosine
  modified_base 17: mod_base = OTHER; note = 2'-O-methoxyethyl 5-methylcytidine
  modified_base 18: mod_base = OTHER; note = 2'-O-methoxyethyl 5-methylcytidine
  modified_base 19: mod_base = OTHER; note = 2'-O-methoxyethyl adenosine
  modified_base 20: mod_base = OTHER; note = 2'-O-methoxyethyl guanosine
  misc_feature 1..5: note = RNA
  misc_feature 6..15: note = DNA
  misc_feature 16..20: note = RNA
gcactagtaaactgagccag

SEQ ID NO: 504 - DNA, 20 bp, synthetic construct
  source 1..20: mol_type = other DNA
  modified_base 1: mod_base = OTHER; note = 2'-O-methoxyethyl guanosine
  modified_base 2: mod_base = OTHER; note = 2'-O-methoxyethyl thymidine
  modified_base 3: mod_base = OTHER; note = 2'-O-methoxyethyl thymidine
  modified_base 4: mod_base = OTHER; note = 2'-O-methoxyethyl 5-methylcytidine
  modified_base 5: mod_base = OTHER; note = 2'-O-methoxyethyl 5-methylcytidine
  modified_base 7: mod_base = OTHER; note = 2'-deoxy 5-methylcytidine
  modified_base 16: mod_base = OTHER; note = 2'-O-methoxyethyl thymidine
  modified_base 17: mod_base = OTHER; note = 2'-O-methoxyethyl 5-methylcytidine
  modified_base 18: mod_base = OTHER; note = 2'-O-methoxyethyl guanosine
  modified_base 19: mod_base = OTHER; note = 2'-O-methoxyethyl guanosine
  modified_base 20: mod_base = OTHER; note = 2'-O-methoxyethyl 5-methylcytidine
  misc_feature 1..5: note = RNA
  misc_feature 6..15: note = DNA
  misc_feature 16..20: note = RNA
gttccgcagtatggatcggc

SEQ ID NO: 505 - DNA, 20 bp, synthetic construct
  source 1..20: mol_type = other DNA
  modified_base 1: mod_base = OTHER; note = 2'-O-methoxyethyl adenosine
  modified_base 2: mod_base = OTHER; note = 2'-O-methoxyethyl 5-methylcytidine
  modified_base 3: mod_base = OTHER; note = 2'-O-methoxyethyl 5-methylcytidine
  modified_base 4: mod_base = OTHER; note = 2'-O-methoxyethyl adenosine
  modified_base 5: mod_base = OTHER; note = 2'-O-methoxyethyl adenosine
  modified_base 12: mod_base = OTHER; note = 2'-deoxy 5-methylcytidine
  modified_base 13: mod_base = OTHER; note = 2'-deoxy 5-methylcytidine
  modified_base 16: mod_base = OTHER; note = 2'-O-methoxyethyl 5-methylcytidine
  modified_base 17: mod_base = OTHER; note = 2'-O-methoxyethyl adenosine
  modified_base 18: mod_base = OTHER; note = 2'-O-methoxyethyl guanosine
  modified_base 19: mod_base = OTHER; note = 2'-O-methoxyethyl 5-methylcytidine
  modified_base 20: mod_base = OTHER; note = 2'-O-methoxyethyl 5-methylcytidine
  misc_feature 1..5: note = RNA
  misc_feature 6..15: note = DNA
  misc_feature 16..20: note = RNA
accaatttatgcctacagcc

SEQ ID NO: 506 - DNA, 20 bp, synthetic construct
  source 1..20: mol_type = other DNA
  modified_base 1: mod_base = OTHER; note = 2'-O-methoxyethyl thymidine
  modified_base 2: mod_base = OTHER; note = 2'-O-methoxyethyl adenosine
  modified_base 3: mod_base = OTHER; note = 2'-O-methoxyethyl thymidine
  modified_base 4: mod_base = OTHER; note = 2'-O-methoxyethyl thymidine
  modified_base 5: mod_base = OTHER; note = 2'-O-methoxyethyl guanosine
  modified_base 14: mod_base = OTHER; note = 2'-deoxy 5-methylcytidine
  modified_base 16: mod_base = OTHER; note = 2'-O-methoxyethyl thymidine
  modified_base 17: mod_base = OTHER; note = 2'-O-methoxyethyl guanosine
  modified_base 18: mod_base = OTHER; note = 2'-O-methoxyethyl thymidine
  modified_base 19: mod_base = OTHER; note = 2'-O-methoxyethyl 5-methylcytidine
  modified_base 20: mod_base = OTHER; note = 2'-O-methoxyethyl adenosine
  misc_feature 1..5: note = RNA
  misc_feature 6..15: note = DNA
  misc_feature 16..20: note = RNA
tattgtgaggattcttgtca

SEQ ID NO: 507 - DNA, 30 bp, synthetic construct
  source 1..30: mol_type = other DNA
  modified_base 1: mod_base = OTHER; note = 2'-O-methoxyethyl thymidine
  modified_base 2: mod_base = OTHER; note = 2'-O-methoxyethyl guanosine
  modified_base 3: mod_base = OTHER; note = 2'-O-methoxyethyl 5-methylcytidine
  modified_base 4: mod_base = OTHER; note = 2'-O-methoxyethyl guanosine
  modified_base 5: mod_base = OTHER; note = 2'-O-methoxyethyl guanosine
  modified_base 19: mod_base = OTHER; note = 2'-deoxy 5-methylcytidine
  modified_base 24: mod_base = OTHER; note = 2'-deoxy 5-methylcytidine
  modified_base 26: mod_base = OTHER; note = 2'-O-methoxyethyl adenosine
  modified_base 27: mod_base = OTHER; note = 2'-O-methoxyethyl 5-methylcytidine
  modified_base 28: mod_base = OTHER; note = 2'-O-methoxyethyl adenosine
  modified_base 29: mod_base = OTHER; note = 2'-O-methoxyethyl adenosine
  modified_base 30: mod_base = OTHER; note = 2'-O-methoxyethyl guanosine
  misc_feature 1..5: note = RNA
  misc_feature 6..25: note = DNA
  misc_feature 26..30: note = RNA
tgcggtattgtgaggattcttgtcaacaag

SEQ ID NO: 508 - DNA, 16 bp, synthetic construct
  source 1..16: mol_type = other DNA
  modified_base 1: mod_base = OTHER; note = 2'-O-methoxyethyl adenosine
  modified_base 2: mod_base = OTHER; note = 2'-O-methoxyethyl guanosine
  modified_base 3: mod_base = OTHER; note = 2'-O-methoxyethyl 5-methylcytidine
  modified_base 10: mod_base = OTHER; note = 2'-deoxy 5-methylcytidine
  modified_base 12: mod_base = OTHER; note = 2'-deoxy 5-methylcytidine
  modified_base 14: mod_base = OTHER; note = 2'-O-methoxyethyl 5-methylcytidine
  modified_base 15: mod_base = OTHER; note = 2'-O-methoxyethyl guanosine
  modified_base 16: mod_base = OTHER; note = 2'-O-methoxyethyl guanosine
  misc_feature 1..3: note = RNA
  misc_feature 4..13: note = DNA
  misc_feature 14..16: note = RNA
agcgaagtgcacacgg

SEQ ID NO: 509 - DNA, 20 bp, synthetic construct
  source 1..20: mol_type = other DNA
  modified_base 1: mod_base = OTHER; note = 2'-O-methoxyethyl 5-methylcytidine
  modified_base 2: mod_base = OTHER; note = 2'-O-methoxyethyl 5-methylcytidine
  modified_base 3: mod_base = OTHER; note = 2'-O-methoxyethyl thymidine
  modified_base 4: mod_base = OTHER; note = 2'-O-methoxyethyl thymidine
  modified_base 5: mod_base = OTHER; note = 2'-O-methoxyethyl 5-methylcytidine
  modified_base 6: mod_base = OTHER; note = 2'-deoxy 5-methylcytidine
  modified_base 7: mod_base = OTHER; note = 2'-deoxy 5-methylcytidine
  modified_base 16: mod_base = OTHER; note = 2'-O-methoxyethyl 5-methylcytidine
  modified_base 17: mod_base = OTHER; note = 2'-O-methoxyethyl 5-methylcytidine
  modified_base 18: mod_base = OTHER; note = 2'-O-methoxyethyl thymidine
  modified_base 19: mod_base = OTHER; note = 2'-O-methoxyethyl 5-methylcytidine
  modified_base 20: mod_base = OTHER; note = 2'-O-methoxyethyl 5-methylcytidine
  misc_feature 1..5: note = RNA
  misc_feature 6..15: note = DNA
  misc_feature 16..20: note = RNA
ccttccctgaaggttcctcc

SEQ ID NO: 510 - DNA, 20 bp, synthetic construct
  source 1..20: mol_type = other DNA
  modified_base 1: mod_base = OTHER; note = 2'-O-methoxyethyl thymidine
  modified_base 2: mod_base = OTHER; note = 2'-O-methoxyethyl thymidine
  modified_base 3: mod_base = OTHER; note = 2'-O-methoxyethyl 5-methylcytidine
  modified_base 4: mod_base = OTHER; note = 2'-O-methoxyethyl thymidine
  modified_base 5: mod_base = OTHER; note = 2'-O-methoxyethyl thymidine
  modified_base 6: mod_base = OTHER; note = 2'-deoxy 5-methylcytidine
  modified_base 9: mod_base = OTHER; note = 2'-deoxy 5-methylcytidine
  modified_base 16: mod_base = OTHER; note = 2'-O-methoxyethyl adenosine
  modified_base 17: mod_base = OTHER; note = 2'-O-methoxyethyl 5-methylcytidine
  modified_base 18: mod_base = OTHER; note = 2'-O-methoxyethyl 5-methylcytidine
  modified_base 19: mod_base = OTHER; note = 2'-O-methoxyethyl thymidine
  modified_base 20: mod_base = OTHER; note = 2'-O-methoxyethyl guanosine
  misc_feature 1..5: note = RNA
  misc_feature 6..15: note = DNA
  misc_feature 16..20: note = RNA
ttcttcttctaggggacctg

SEQ ID NO: 511 - DNA, 20 bp, synthetic construct
  source 1..20: mol_type = other DNA
  modified_base 1: mod_base = OTHER; note = 2'-O-methoxyethyl adenosine
  modified_base 2: mod_base = OTHER; note = 2'-O-methoxyethyl 5-methylcytidine
  modified_base 3: mod_base = OTHER; note = 2'-O-methoxyethyl adenosine
  modified_base 4: mod_base = OTHER; note = 2'-O-methoxyethyl adenosine
  modified_base 5: mod_base = OTHER; note = 2'-O-methoxyethyl adenosine
  modified_base 6: mod_base = OTHER; note = 2'-deoxy 5-methylcytidine
  modified_base 10: mod_base = OTHER; note = 2'-deoxy 5-methylcytidine
  modified_base 13: mod_base = OTHER; note = 2'-deoxy 5-methylcytidine
  modified_base 16: mod_base = OTHER; note = 2'-O-methoxyethyl adenosine
  modified_base 17: mod_base = OTHER; note = 2'-O-methoxyethyl 5-methylcytidine
  modified_base 18: mod_base = OTHER; note = 2'-O-methoxyethyl 5-methylcytidine
  modified_base 19: mod_base = OTHER; note = 2'-O-methoxyethyl thymidine
  modified_base 20: mod_base = OTHER; note = 2'-O-methoxyethyl thymidine
  misc_feature 1..5: note = RNA
  misc_feature 6..15: note = DNA
  misc_feature 16..20: note = RNA
acaaacgggcaacatacctt

SEQ ID NO: 512 - DNA, 20 bp, synthetic construct
  source 1..20: mol_type = other DNA
  modified_base 1: mod_base = OTHER; note = 2'-O-methoxyethyl guanosine
  modified_base 2: mod_base = OTHER; note = 2'-O-methoxyethyl thymidine
  modified_base 3: mod_base = OTHER; note = 2'-O-methoxyethyl guanosine
  modified_base 4: mod_base = OTHER; note = 2'-O-methoxyethyl adenosine
  modified_base 5: mod_base = OTHER; note = 2'-O-methoxyethyl adenosine
  modified_base 7: mod_base = OTHER; note = 2'-deoxy 5-methylcytidine
  modified_base 14: mod_base = OTHER; note = 2'-deoxy 5-methylcytidine
  modified_base 16: mod_base = OTHER; note = 2'-O-methoxyethyl 5-methylcytidine
  modified_base 17: mod_base = OTHER; note = 2'-O-methoxyethyl 5-methylcytidine
  modified_base 18: mod_base = OTHER; note = 2'-O-methoxyethyl adenosine
  modified_base 19: mod_base = OTHER; note = 2'-O-methoxyethyl adenosine
  modified_base 20: mod_base = OTHER; note = 2'-O-methoxyethyl 5-methylcytidine
  misc_feature 1..5: note = RNA
  misc_feature 6..15: note = DNA
  misc_feature 16..20: note = RNA
gtgaagcgaagtgcaccaac

SEQ ID NO: 513 - DNA, 20 bp, synthetic construct
  source 1..20: mol_type = other DNA
  modified_base 1: mod_base = OTHER; note = 2'-O-methoxyethyl 5-methylcytidine
  modified_base 2: mod_base = OTHER; note = 2'-O-methoxyethyl adenosine
  modified_base 3: mod_base = OTHER; note = 2'-O-methoxyethyl adenosine
  modified_base 4: mod_base = OTHER; note = 2'-O-methoxyethyl 5-methylcytidine
  modified_base 5: mod_base = OTHER; note = 2'-O-methoxyethyl adenosine
  modified_base 7: mod_base = OTHER; note = 2'-deoxy 5-methylcytidine
  modified_base 14: mod_base = OTHER; note = 2'-deoxy 5-methylcytidine
  modified_base 16: mod_base = OTHER; note = 2'-O-methoxyethyl 5-methylcytidine
  modified_base 17: mod_base = OTHER; note = 2'-O-methoxyethyl adenosine
  modified_base 18: mod_base = OTHER; note = 2'-O-methoxyethyl 5-methylcytidine
  modified_base 19: mod_base = OTHER; note = 2'-O-methoxyethyl guanosine
  modified_base 20: mod_base = OTHER; note = 2'-O-methoxyethyl guanosine
  misc_feature 1..5: note = RNA
  misc_feature 6..15: note = DNA
  misc_feature 16..20: note = RNA
caacagcgaagtgcacacgg

SEQ ID NO: 514 - DNA, 20 bp, synthetic construct
  source 1..20: mol_type = other DNA
  modified_base 1: mod_base = OTHER; note = 2'-O-methoxyethyl 5-methylcytidine
  modified_base 2: mod_base = OTHER; note = 2'-O-methoxyethyl thymidine
  modified_base 3: mod_base = OTHER; note = 2'-O-methoxyethyl guanosine
  modified_base 4: mod_base = OTHER; note = 2'-O-methoxyethyl 5-methylcytidine
  modified_base 5: mod_base = OTHER; note = 2'-O-methoxyethyl guanosine
  modified_base 16: mod_base = OTHER; note = 2'-O-methoxyethyl guanosine
  modified_base 17: mod_base = OTHER; note = 2'-O-methoxyethyl adenosine
  modified_base 18: mod_base = OTHER; note = 2'-O-methoxyethyl thymidine
  modified_base 19: mod_base = OTHER; note = 2'-O-methoxyethyl thymidine
  modified_base 20: mod_base = OTHER; note = 2'-O-methoxyethyl 5-methylcytidine
  misc_feature 1..5: note = RNA
  misc_feature 6..15: note = DNA
  misc_feature 16..20: note = RNA
ctgcggtattgtgaggattc

SEQ ID NO: 515 - DNA, 20 bp, synthetic construct
  source 1..20: mol_type = other DNA
  modified_base 1: mod_base = OTHER; note = 2'-O-methoxyethyl guanosine
  modified_base 2: mod_base = OTHER; note = 2'-O-methoxyethyl 5-methylcytidine
  modified_base 3: mod_base = OTHER; note = 2'-O-methoxyethyl guanosine
  modified_base 4: mod_base = OTHER; note = 2'-O-methoxyethyl guanosine
  modified_base 5: mod_base = OTHER; note = 2'-O-methoxyethyl thymidine
  modified_base 16: mod_base = OTHER; note = 2'-O-methoxyethyl thymidine
  modified_base 17: mod_base = OTHER; note = 2'-O-methoxyethyl thymidine
  modified_base 18: mod_base = OTHER; note = 2'-O-methoxyethyl 5-methylcytidine
  modified_base 19: mod_base = OTHER; note = 2'-O-methoxyethyl thymidine
  modified_base 20: mod_base = OTHER; note = 2'-O-methoxyethyl thymidine
  misc_feature 1..5: note = RNA
  misc_feature 6..15: note = DNA
  misc_feature 16..20: note = RNA
gcggtattgtgaggattctt

SEQ ID NO: 516 - DNA, 20 bp, synthetic construct
  source 1..20: mol_type = other DNA
  modified_base 1: mod_base = OTHER; note = 2'-O-methoxyethyl guanosine
  modified_base 2: mod_base = OTHER; note = 2'-O-methoxyethyl guanosine
  modified_base 3: mod_base = OTHER; note = 2'-O-methoxyethyl thymidine
  modified_base 4: mod_base = OTHER; note = 2'-O-methoxyethyl adenosine
  modified_base 5: mod_base = OTHER; note = 2'-O-methoxyethyl thymidine
  modified_base 16: mod_base = OTHER; note = 2'-O-methoxyethyl 5-methylcytidine
  modified_base 17: mod_base = OTHER; note = 2'-O-methoxyethyl thymidine
  modified_base 18: mod_base = OTHER; note = 2'-O-methoxyethyl thymidine
  modified_base 19: mod_base = OTHER; note = 2'-O-methoxyethyl guanosine
  modified_base 20: mod_base = OTHER; note = 2'-O-methoxyethyl thymidine
  misc_feature 1..5: note = RNA
  misc_feature 6..15: note = DNA
  misc_feature 16..20: note = RNA
ggtattgtgaggattcttgt

SEQ ID NO: 517 - DNA, 20 bp, synthetic construct
  source 1..20: mol_type = other DNA
  modified_base 1: mod_base = OTHER; note = 2'-O-methoxyethyl thymidine
  modified_base 2: mod_base = OTHER; note = 2'-O-methoxyethyl adenosine
  modified_base 3: mod_base = OTHER; note = 2'-O-methoxyethyl thymidine
  modified_base 4: mod_base = OTHER; note = 2'-O-methoxyethyl thymidine
  modified_base 5: mod_base = OTHER; note = 2'-O-methoxyethyl guanosine
  modified_base 14: mod_base = OTHER; note = 2'-deoxy 5-methylcytidine
  modified_base 16: mod_base = OTHER; note = 2'-O-methoxyethyl thymidine
  modified_base 17: mod_base = OTHER; note = 2'-O-methoxyethyl guanosine
  modified_base 18: mod_base = OTHER; note = 2'-O-methoxyethyl thymidine
  modified_base 19: mod_base = OTHER; note = 2'-O-methoxyethyl 5-methylcytidine
  modified_base 20: mod_base = OTHER; note = 2'-O-methoxyethyl adenosine
  misc_feature 1..5: note = RNA
  misc_feature 6..15: note = DNA
  misc_feature 16..20: note = RNA
tattgtgaggattcttgtca

SEQ ID NO: 518 - DNA, 20 bp, synthetic construct
  source 1..20: mol_type = other DNA
  modified_base 1: mod_base = OTHER; note = 2'-O-methoxyethyl thymidine
  modified_base 2: mod_base = OTHER; note = 2'-O-methoxyethyl thymidine
  modified_base 3: mod_base = OTHER; note = 2'-O-methoxyethyl guanosine
  modified_base 4: mod_base = OTHER; note = 2'-O-methoxyethyl thymidine
  modified_base 5: mod_base = OTHER; note = 2'-O-methoxyethyl guanosine
  modified_base 12: mod_base = OTHER; note = 2'-deoxy 5-methylcytidine
  modified_base 16: mod_base = OTHER; note = 2'-O-methoxyethyl thymidine
  modified_base 17: mod_base = OTHER; note = 2'-O-methoxyethyl 5-methylcytidine
  modified_base 18: mod_base = OTHER; note = 2'-O-methoxyethyl adenosine
  modified_base 19: mod_base = OTHER; note = 2'-O-methoxyethyl adenosine
  modified_base 20: mod_base = OTHER; note = 2'-O-methoxyethyl 5-methylcytidine
  misc_feature 1..5: note = RNA
  misc_feature 6..15: note = DNA
  misc_feature 16..20: note = RNA
ttgtgaggattcttgtcaac

SEQ ID NO: 519 - DNA, 20 bp, synthetic construct
  source 1..20: mol_type = other DNA
  modified_base 1: mod_base = OTHER; note = 2'-O-methoxyethyl guanosine
  modified_base 2: mod_base = OTHER; note = 2'-O-methoxyethyl thymidine
  modified_base 3: mod_base = OTHER; note = 2'-O-methoxyethyl guanosine
  modified_base 4: mod_base = OTHER; note = 2'-O-methoxyethyl adenosine
  modified_base 5: mod_base = OTHER; note = 2'-O-methoxyethyl guanosine
  modified_base 10: mod_base = OTHER; note = 2'-deoxy 5-methylcytidine
  modified_base 15: mod_base = OTHER; note = 2'-deoxy 5-methylcytidine
  modified_base 16: mod_base = OTHER; note = 2'-O-methoxyethyl adenosine
  modified_base 17: mod_base = OTHER; note = 2'-O-methoxyethyl adenosine
  modified_base 18: mod_base = OTHER; note = 2'-O-methoxyethyl 5-methylcytidine
  modified_base 19: mod_base = OTHER; note = 2'-O-methoxyethyl adenosine
  modified_base 20: mod_base = OTHER; note = 2'-O-methoxyethyl adenosine
  misc_feature 1..5: note = RNA
  misc_feature 6..15: note = DNA
  misc_feature 16..20: note = RNA
gtgaggattcttgtcaacaa

SEQ ID NO: 520 - DNA, 20 bp, synthetic construct
  source 1..20: mol_type = other DNA
  modified_base 1: mod_base = OTHER; note = 2'-O-methoxyethyl guanosine
  modified_base 2: mod_base = OTHER; note = 2'-O-methoxyethyl adenosine
  modified_base 3: mod_base = OTHER; note = 2'-O-methoxyethyl guanosine
  modified_base 4: mod_base = OTHER; note = 2'-O-methoxyethyl guanosine
  modified_base 5: mod_base = OTHER; note = 2'-O-methoxyethyl adenosine
  modified_base 8: mod_base = OTHER; note = 2'-deoxy 5-methylcytidine
  modified_base 13: mod_base = OTHER; note = 2'-deoxy 5-methylcytidine
  modified_base 16: mod_base = OTHER; note = 2'-O-methoxyethyl 5-methylcytidine
  modified_base 17: mod_base = OTHER; note = 2'-O-methoxyethyl adenosine
  modified_base 18: mod_base = OTHER; note = 2'-O-methoxyethyl adenosine
  modified_base 19: mod_base = OTHER; note = 2'-O-methoxyethyl guanosine
  modified_base 20: mod_base = OTHER; note = 2'-O-methoxyethyl adenosine
  misc_feature 1..5: note = RNA
  misc_feature 6..15: note = DNA
  misc_feature 16..20: note = RNA
gaggattcttgtcaacaaga

SEQ ID NO: 521 - DNA, 20 bp, synthetic construct
  source 1..20: mol_type = other DNA
  modified_base 1: mod_base = OTHER; note = 2'-O-methoxyethyl adenosine
  modified_base 2: mod_base = OTHER; note = 2'-O-methoxyethyl adenosine
  modified_base 3: mod_base = OTHER; note = 2'-O-methoxyethyl adenosine
  modified_base 4: mod_base = OTHER; note = 2'-O-methoxyethyl thymidine
  modified_base 5: mod_base = OTHER; note = 2'-O-methoxyethyl guanosine
  modified_base 7: mod_base = OTHER; note = 2'-deoxy 5-methylcytidine
  modified_base 9: mod_base = OTHER; note = 2'-deoxy 5-methylcytidine
  modified_base 16: mod_base = OTHER; note = 2'-O-methoxyethyl adenosine
  modified_base 17: mod_base = OTHER; note = 2'-O-methoxyethyl 5-methylcytidine
  modified_base 18: mod_base = OTHER; note = 2'-O-methoxyethyl thymidine
  modified_base 19: mod_base = OTHER; note = 2'-O-methoxyethyl guanosine
  modified_base 20: mod_base = OTHER; note = 2'-O-methoxyethyl adenosine
  misc_feature 1..5: note = RNA
  misc_feature 6..15: note = DNA
  misc_feature 16..20: note = RNA
aaatggcactagtaaactga

SEQ ID NO: 522 - DNA, 20 bp, synthetic construct
  source 1..20: mol_type = other DNA
  modified_base 1: mod_base = OTHER; note = 2'-O-methoxyethyl adenosine
  modified_base 2: mod_base = OTHER; note = 2'-O-methoxyethyl thymidine
  modified_base 3: mod_base = OTHER; note = 2'-O-methoxyethyl guanosine
  modified_base 4: mod_base = OTHER; note = 2'-O-methoxyethyl guanosine
  modified_base 5: mod_base = OTHER; note = 2'-O-methoxyethyl 5-methylcytidine
  modified_base 7: mod_base = OTHER; note = 2'-deoxy 5-methylcytidine
  modified_base 15: mod_base = OTHER; note = 2'-deoxy 5-methylcytidine
  modified_base 16: mod_base = OTHER; note = 2'-O-methoxyethyl thymidine
  modified_base 17: mod_base = OTHER; note = 2'-O-methoxyethyl guanosine
  modified_base 18: mod_base = OTHER; note = 2'-O-methoxyethyl adenosine
  modified_base 19: mod_base = OTHER; note = 2'-O-methoxyethyl guanosine
  modified_base 20: mod_base = OTHER; note = 2'-O-methoxyethyl 5-methylcytidine
  misc_feature 1..5: note = RNA
  misc_feature 6..15: note = DNA
  misc_feature 16..20: note = RNA
atggcactagtaaactgagc

SEQ ID NO: 523 - DNA, 20 bp, synthetic construct
  source 1..20: mol_type = other DNA
  modified_base 1: mod_base = OTHER; note = 2'-O-methoxyethyl guanosine
  modified_base 2: mod_base = OTHER; note = 2'-O-methoxyethyl guanosine
  modified_base 3: mod_base = OTHER; note = 2'-O-methoxyethyl 5-methylcytidine
  modified_base 4: mod_base = OTHER; note = 2'-O-methoxyethyl adenosine
  modified_base 5: mod_base = OTHER; note = 2'-O-methoxyethyl 5-methylcytidine
  modified_base 13: mod_base = OTHER; note = 2'-deoxy 5-methylcytidine
  modified_base 16: mod_base = OTHER; note = 2'-O-methoxyethyl adenosine
  modified_base 17: mod_base = OTHER; note = 2'-O-methoxyethyl guanosine
  modified_base 18: mod_base = OTHER; note = 2'-O-methoxyethyl 5-methylcytidine
  modified_base 19: mod_base = OTHER; note = 2'-O-methoxyethyl 5-methylcytidine
  modified_base 20: mod_base = OTHER; note = 2'-O-methoxyethyl adenosine
  misc_feature 1..5: note = RNA
  misc_feature 6..15: note = DNA
  misc_feature 16..20: note = RNA
ggcactagtaaactgagcca

SEQ ID NO: 524 - DNA, 20 bp, synthetic construct
  source 1..20: mol_type = other DNA
  modified_base 1: mod_base = OTHER; note = 2'-O-methoxyethyl 5-methylcytidine
  modified_base 2: mod_base = OTHER; note = 2'-O-methoxyethyl adenosine
  modified_base 3: mod_base = OTHER; note = 2'-O-methoxyethyl 5-methylcytidine
  modified_base 4: mod_base = OTHER; note = 2'-O-methoxyethyl thymidine
  modified_base 5: mod_base = OTHER; note = 2'-O-methoxyethyl adenosine
  modified_base 11: mod_base = OTHER; note = 2'-deoxy 5-methylcytidine
  modified_base 16: mod_base = OTHER; note = 2'-O-methoxyethyl 5-methylcytidine
  modified_base 17: mod_base = OTHER; note = 2'-O-methoxyethyl 5-methylcytidine
  modified_base 18: mod_base = OTHER; note = 2'-O-methoxyethyl adenosine
  modified_base 19: mod_base = OTHER; note = 2'-O-methoxyethyl guanosine
  modified_base 20: mod_base = OTHER; note = 2'-O-methoxyethyl guanosine
  misc_feature 1..5: note = RNA
  misc_feature 6..15: note = DNA
  misc_feature 16..20: note = RNA
cactagtaaactgagccagg

SEQ ID NO: 525 - DNA, 20 bp, synthetic construct
  source 1..20: mol_type = other DNA
  modified_base 1: mod_base = OTHER; note = 2'-O-methoxyethyl 5-methylcytidine
  modified_base 2: mod_base = OTHER; note = 2'-O-methoxyethyl thymidine
  modified_base 3: mod_base = OTHER; note = 2'-O-methoxyethyl adenosine
  modified_base 4: mod_base = OTHER; note = 2'-O-methoxyethyl guanosine
  modified_base 5: mod_base = OTHER; note = 2'-O-methoxyethyl thymidine
  modified_base 9: mod_base = OTHER; note = 2'-deoxy 5-methylcytidine
  modified_base 14: mod_base = OTHER; note = 2'-deoxy 5-methylcytidine
  modified_base 15: mod_base = OTHER; note = 2'-deoxy 5-methylcytidine
  modified_base 16: mod_base = OTHER; note = 2'-O-methoxyethyl adenosine
  modified_base 17: mod_base = OTHER; note = 2'-O-methoxyethyl guanosine
  modified_base 18: mod_base = OTHER; note = 2'-O-methoxyethyl guanosine
  modified_base 19: mod_base = OTHER; note = 2'-O-methoxyethyl adenosine
  modified_base 20: mod_base = OTHER; note = 2'-O-methoxyethyl guanosine
  misc_feature 1..5: note = RNA
  misc_feature 6..15: note = DNA
  misc_feature 16..20: note = RNA
ctagtaaactgagccaggag

SEQ ID NO: 526 - DNA, 20 bp, synthetic construct
  source 1..20: mol_type = other DNA
  modified_base 1: mod_base = OTHER; note = 2'-O-methoxyethyl adenosine
  modified_base 2: mod_base = OTHER; note = 2'-O-methoxyethyl guanosine
  modified_base 3: mod_base = OTHER; note = 2'-O-methoxyethyl thymidine
  modified_base 4: mod_base = OTHER; note = 2'-O-methoxyethyl adenosine
  modified_base 5: mod_base = OTHER; note = 2'-O-methoxyethyl adenosine
  modified_base 7: mod_base = OTHER; note = 2'-deoxy 5-methylcytidine
  modified_base 12: mod_base = OTHER; note = 2'-deoxy 5-methylcytidine
  modified_base 13: mod_base = OTHER; note = 2'-deoxy 5-methylcytidine
  modified_base 16: mod_base = OTHER; note = 2'-O-methoxyethyl guanosine
  modified_base 17: mod_base = OTHER; note = 2'-O-methoxyethyl adenosine
  modified_base 18: mod_base = OTHER; note = 2'-O-methoxyethyl guanosine
  modified_base 19: mod_base = OTHER; note = 2'-O-methoxyethyl adenosine
  modified_base 20: mod_base = OTHER; note = 2'-O-methoxyethyl adenosine
  misc_feature 1..5: note = RNA
  misc_feature 6..15: note = DNA
  misc_feature 16..20: note = RNA
agtaaactgagccaggagaa

SEQ ID NO: 527 - DNA, 20 bp, synthetic construct
  source 1..20: mol_type = other DNA
  modified_base 1: mod_base = OTHER; note = 2'-O-methoxyethyl thymidine
  modified_base 2: mod_base = OTHER; note = 2'-O-methoxyethyl adenosine
  modified_base 3: mod_base = OTHER; note = 2'-O-methoxyethyl guanosine
  modified_base 4: mod_base = OTHER; note = 2'-O-methoxyethyl guanosine
  modified_base 5: mod_base = OTHER; note = 2'-O-methoxyethyl adenosine
  modified_base 9: mod_base = OTHER; note = 2'-deoxy 5-methylcytidine
  modified_base 10: mod_base = OTHER; note = 2'-deoxy 5-methylcytidine
  modified_base 12: mod_base = OTHER; note = 2'-deoxy 5-methylcytidine
  modified_base 16: mod_base = OTHER; note = 2'-O-methoxyethyl adenosine
  modified_base 17: mod_base = OTHER; note = 2'-O-methoxyethyl thymidine
  modified_base 18: mod_base = OTHER; note = 2'-O-methoxyethyl guanosine
  modified_base 19: mod_base = OTHER; note = 2'-O-methoxyethyl guanosine
  modified_base 20: mod_base = OTHER; note = 2'-O-methoxyethyl adenosine
  misc_feature 1..5: note = RNA
  misc_feature 6..15: note = DNA
  misc_feature 16..20: note = RNA
taggagttccgcagtatgga

SEQ ID NO: 528 - DNA, 20 bp, synthetic construct
  source 1..20: mol_type = other DNA
  modified_base 1: mod_base = OTHER; note = 2'-O-methoxyethyl guanosine
  modified_base 2: mod_base = OTHER; note = 2'-O-methoxyethyl guanosine
  modified_base 3: mod_base = OTHER; note = 2'-O-methoxyethyl adenosine
  modified_base 4: mod_base = OTHER; note = 2'-O-methoxyethyl guanosine
  modified_base 5: mod_base = OTHER; note = 2'-O-methoxyethyl thymidine
  modified_base 7: mod_base = OTHER; note = 2'-deoxy 5-methylcytidine
  modified_base 8: mod_base = OTHER; note = 2'-deoxy 5-methylcytidine
  modified_base 10: mod_base = OTHER; note = 2'-deoxy 5-methylcytidine
  modified_base 16: mod_base = OTHER; note = 2'-O-methoxyethyl guanosine
  modified_base 17: mod_base = OTHER; note = 2'-O-methoxyethyl guanosine
  modified_base 18: mod_base = OTHER; note = 2'-O-methoxyethyl adenosine
  modified_base 19: mod_base = OTHER; note = 2'-O-methoxyethyl thymidine
  modified_base 20: mod_base = OTHER; note = 2'-O-methoxyethyl 5-methylcytidine
  misc_feature 1..5: note = RNA
  misc_feature 6..15: note = DNA
  misc_feature 16..20: note = RNA
ggagttccgcagtatggatc

SEQ ID NO: 529 - DNA, 20 bp, synthetic construct
  source 1..20: mol_type = other DNA
  modified_base 1: mod_base = OTHER; note = 2'-O-methoxyethyl adenosine
  modified_base 2: mod_base = OTHER; note = 2'-O-methoxyethyl guanosine
  modified_base 3: mod_base = OTHER; note = 2'-O-methoxyethyl thymidine
  modified_base 4: mod_base = OTHER; note = 2'-O-methoxyethyl thymidine
  modified_base 5: mod_base = OTHER; note = 2'-O-methoxyethyl 5-methylcytidine
  modified_base 6: mod_base = OTHER; note = 2'-deoxy 5-methylcytidine
  modified_base 8: mod_base = OTHER; note = 2'-deoxy 5-methylcytidine
  modified_base 16: mod_base = OTHER; note = 2'-O-methoxyethyl adenosine
  modified_base 17: mod_base = OTHER; note = 2'-O-methoxyethyl thymidine
  modified_base 18: mod_base = OTHER; note = 2'-O-methoxyethyl 5-methylcytidine
  modified_base 19: mod_base = OTHER; note = 2'-O-methoxyethyl guanosine
  modified_base 20: mod_base = OTHER; note = 2'-O-methoxyethyl guanosine
  misc_feature 1..5: note = RNA
  misc_feature 6..15: note = DNA
  misc_feature 16..20: note = RNA
agttccgcagtatggatcgg

SEQ ID NO: 530 - DNA, 20 bp, synthetic construct
  source 1..20: mol_type = other DNA
  modified_base 1: mod_base = OTHER; note = 2'-O-methoxyethyl thymidine
  modified_base 2: mod_base = OTHER; note = 2'-O-methoxyethyl thymidine
  modified_base 3: mod_base = OTHER; note = 2'-O-methoxyethyl 5-methylcytidine
  modified_base 4: mod_base = OTHER; note = 2'-O-methoxyethyl 5-methylcytidine
  modified_base 5: mod_base = OTHER; note = 2'-O-methoxyethyl guanosine
  modified_base 6: mod_base = OTHER; note = 2'-deoxy 5-methylcytidine
  modified_base 16: mod_base = OTHER; note = 2'-O-methoxyethyl 5-methylcytidine
  modified_base 17: mod_base = OTHER; note = 2'-O-methoxyethyl guanosine
  modified_base 18: mod_base = OTHER; note = 2'-O-methoxyethyl guanosine
  modified_base 19: mod_base = OTHER; note = 2'-O-methoxyethyl 5-methylcytidine
  modified_base 20: mod_base = OTHER; note = 2'-O-methoxyethyl adenosine
  misc_feature 1..5: note = RNA
  misc_feature 6..15: note = DNA
  misc_feature 16..20: note = RNA
ttccgcagtatggatcggca

SEQ ID NO: 531 - DNA, 20 bp, synthetic construct
  source 1..20: mol_type = other DNA
  modified_base 1: mod_base = OTHER; note = 2'-O-methoxyethyl 5-methylcytidine
  modified_base 2: mod_base = OTHER; note = 2'-O-methoxyethyl 5-methylcytidine
  modified_base 3: mod_base = OTHER; note = 2'-O-methoxyethyl guanosine
  modified_base 4: mod_base = OTHER; note = 2'-O-methoxyethyl 5-methylcytidine
  modified_base 5: mod_base = OTHER; note = 2'-O-methoxyethyl adenosine
  modified_base 14: mod_base = OTHER; note = 2'-deoxy 5-methylcytidine
  modified_base 16: mod_base = OTHER; note = 2'-O-methoxyethyl guanosine
  modified_base 17: mod_base = OTHER; note = 2'-O-methoxyethyl 5-methylcytidine
  modified_base 18: mod_base = OTHER; note = 2'-O-methoxyethyl adenosine
  modified_base 19: mod_base = OTHER; note = 2'-O-methoxyethyl guanosine
  modified_base 20: mod_base = OTHER; note = 2'-O-methoxyethyl adenosine
  misc_feature 1..5: note = RNA
  misc_feature 6..15: note = DNA
  misc_feature 16..20: note = RNA
ccgcagtatggatcggcaga

SEQ ID NO: 532 - DNA, 20 bp, synthetic construct
  source 1..20: mol_type = other DNA
  modified_base 1: mod_base = OTHER; note = 2'-O-methoxyethyl guanosine
  modified_base 2: mod_base = OTHER; note = 2'-O-methoxyethyl 5-methylcytidine
  modified_base 3: mod_base = OTHER; note = 2'-O-methoxyethyl adenosine
  modified_base 4: mod_base = OTHER; note = 2'-O-methoxyethyl guanosine
  modified_base 5: mod_base = OTHER; note = 2'-O-methoxyethyl thymidine
  modified_base 12: mod_base = OTHER; note = 2'-deoxy 5-methylcytidine
  modified_base 15: mod_base = OTHER; note = 2'-deoxy 5-methylcytidine
  modified_base 16: mod_base = OTHER; note = 2'-O-methoxyethyl adenosine
  modified_base 17: mod_base = OTHER; note = 2'-O-methoxyethyl guanosine
  modified_base 18: mod_base = OTHER; note = 2'-O-methoxyethyl adenosine
  modified_base 19: mod_base = OTHER; note = 2'-O-methoxyethyl guanosine
  modified_base 20: mod_base = OTHER; note = 2'-O-methoxyethyl guanosine
  misc_feature 1..5: note = RNA
  misc_feature 6..15: note = DNA
  misc_feature 16..20: note = RNA
gcagtatggatcggcagagg

SEQ ID NO: 533 - DNA, 30 bp, synthetic construct
  source 1..30: mol_type = other DNA
  modified_base 1: mod_base = OTHER; note = 2'-O-methoxyethyl adenosine
  modified_base 2: mod_base = OTHER; note = 2'-O-methoxyethyl adenosine
  modified_base 3: mod_base = OTHER; note = 2'-O-methoxyethyl adenosine
  modified_base 4: mod_base = OTHER; note = 2'-O-methoxyethyl uridine
  modified_base 5: mod_base = OTHER; note = 2'-O-methoxyethyl guanosine
  modified_base 7: mod_base = OTHER; note = 2'-deoxy 5-methylcytidine
  modified_base 9: mod_base = OTHER; note = 2'-deoxy 5-methylcytidine
  modified_base 17: mod_base = OTHER; note = 2'-deoxy 5-methylcytidine
  modified_base 22: mod_base = OTHER; note = 2'-deoxy 5-methylcytidine
  modified_base 23: mod_base = OTHER; note = 2'-deoxy 5-methylcytidine
  modified_base 26: mod_base = OTHER; note = 2'-O-methoxyethyl guanosine
  modified_base 27: mod_base = OTHER; note = 2'-O-methoxyethyl adenosine
  modified_base 28: mod_base = OTHER; note = 2'-O-methoxyethyl guanosine
  modified_base 29: mod_base = OTHER; note = 2'-O-methoxyethyl adenosine
  modified_base 30: mod_base = OTHER; note = 2'-O-methoxyethyl adenosine
  misc_feature 1..5: note = RNA
  misc_feature 6..25: note = DNA
  misc_feature 26..30: note = RNA
aaatggcactagtaaactgagccaggagaa

SEQ ID NO: 534 - DNA, 30 bp, synthetic construct
  source 1..30: mol_type = other DNA
  modified_base 1: mod_base = OTHER; note = 2'-O-methoxyethyl uridine
  modified_base 2: mod_base = OTHER; note = 2'-O-methoxyethyl adenosine
  modified_base 3: mod_base = OTHER; note = 2'-O-methoxyethyl guanosine
  modified_base 4: mod_base = OTHER; note = 2'-O-methoxyethyl guanosine
  modified_base 5: mod_base = OTHER; note = 2'-O-methoxyethyl adenosine
  modified_base 9: mod_base = OTHER; note = 2'-deoxy 5-methylcytidine
  modified_base 10: mod_base = OTHER; note = 2'-deoxy 5-methylcytidine
  modified_base 12: mod_base = OTHER; note = 2'-deoxy 5-methylcytidine
  modified_base 22: mod_base = OTHER; note = 2'-deoxy 5-methylcytidine
  modified_base 25: mod_base = OTHER; note = 2'-deoxy 5-methylcytidine
  modified_base 26: mod_base = OTHER; note = 2'-O-methoxyethyl adenosine
  modified_base 27: mod_base = OTHER; note = 2'-O-methoxyethyl guanosine
  modified_base 28: mod_base = OTHER; note = 2'-O-methoxyethyl adenosine
  modified_base 29: mod_base = OTHER; note = 2'-O-methoxyethyl guanosine
  modified_base 30: mod_base = OTHER; note = 2'-O-methoxyethyl guanosine
  misc_feature 1..5: note = RNA
  misc_feature 6..25: note = DNA
  misc_feature 26..30: note = RNA
taggagttccgcagtatggatcggcagagg

SEQ ID NO: 535 - DNA, 30 bp, synthetic construct
  source 1..30: mol_type = other DNA
  modified_base 1: mod_base = OTHER; note = 2'-O-methoxyethyl 5-methylcytidine
  modified_base 2: mod_base = OTHER; note = 2'-O-methoxyethyl guanosine
  modified_base 3: mod_base = OTHER; note = 2'-O-methoxyethyl 5-methylcytidine
  modified_base 4: mod_base = OTHER; note = 2'-O-methoxyethyl adenosine
  modified_base 5: mod_base = OTHER; note = 2'-O-methoxyethyl guanosine
  modified_base 7: mod_base = OTHER; note = 2'-deoxy 5-methylcytidine
  modified_base 8: mod_base = OTHER; note = 2'-deoxy 5-methylcytidine
  modified_base 17: mod_base = OTHER; note = 2'-deoxy 5-methylcytidine
  modified_base 18: mod_base = OTHER; note = 2'-deoxy 5-methylcytidine
  modified_base 21: mod_base = OTHER; note = 2'-deoxy 5-methylcytidine
  modified_base 24: mod_base = OTHER; note = 2'-deoxy 5-methylcytidine
  modified_base 25: mod_base = OTHER; note = 2'-deoxy 5-methylcytidine
  modified_base 26: mod_base = OTHER; note = 2'-O-methoxyethyl uridine
  modified_base 27: mod_base = OTHER; note = 2'-O-methoxyethyl 5-methylcytidine
  modified_base 28: mod_base = OTHER; note = 2'-O-methoxyethyl 5-methylcytidine
  modified_base 29: mod_base = OTHER; note = 2'-O-methoxyethyl uridine
  modified_base 30: mod_base = OTHER; note = 2'-O-methoxyethyl adenosine
  misc_feature 1..5: note = RNA
  misc_feature 6..25: note = DNA
  misc_feature 26..30: note = RNA
cgcagaccaatttatgcctacagcctccta

SEQ ID NO: 536 - DNA, 30 bp, synthetic construct
  source 1..30: mol_type = other DNA
  modified_base 1: mod_base = OTHER; note = 2'-O-methoxyethyl adenosine
  modified_base 2: mod_base = OTHER; note = 2'-O-methoxyethyl guanosine
  modified_base 3: mod_base = OTHER; note = 2'-O-methoxyethyl adenosine
  modified_base 4: mod_base = OTHER; note = 2'-O-methoxyethyl guanosine
  modified_base 5: mod_base = OTHER; note = 2'-O-methoxyethyl guanosine
  modified_base 7: mod_base = OTHER; note = 2'-deoxy 5-methylcytidine
  modified_base 11: mod_base = OTHER; note = 2'-deoxy 5-methylcytidine
  modified_base 15: mod_base = OTHER; note = 2'-deoxy 5-methylcytidine
  modified_base 18: mod_base = OTHER; note = 2'-deoxy 5-methylcytidine
  modified_base 22: mod_base = OTHER; note = 2'-deoxy 5-methylcytidine
  modified_base 23: mod_base = OTHER; note = 2'-deoxy 5-methylcytidine
  modified_base 26: mod_base = OTHER; note = 2'-O-methoxyethyl guanosine
  modified_base 27: mod_base = OTHER; note = 2'-O-methoxyethyl adenosine
  modified_base 28: mod_base = OTHER; note = 2'-O-methoxyethyl uridine
  modified_base 29: mod_base = OTHER; note = 2'-O-methoxyethyl adenosine
  modified_base 30: mod_base = OTHER; note = 2'-O-methoxyethyl guanosine
  misc_feature 1..5: note = RNA
  misc_feature 6..25: note = DNA
  misc_feature 26..30: note = RNA
agaggacaaacgggcaacataccttgatag

SEQ ID NO: 537 - DNA, 20 bp, synthetic construct
  source 1..20: mol_type = other DNA
  modified_base 1: mod_base = OTHER; note = 2'-O-methoxyethyl guanosine
  modified_base 2: mod_base = OTHER; note = 2'-O-methoxyethyl guanosine
  modified_base 3: mod_base = OTHER; note = 2'-O-methoxyethyl adenosine
  modified_base 4: mod_base = OTHER; note = 2'-O-methoxyethyl uridine
  modified_base 5: mod_base = OTHER; note = 2'-O-methoxyethyl uridine
  modified_base 6: mod_base = OTHER; note = 2'-deoxy 5-methylcytidine
  modified_base 9: mod_base = OTHER; note = 2'-deoxy 5-methylcytidine
  modified_base 11: mod_base = OTHER; note = 2'-deoxy 5-methylcytidine
  modified_base 12: mod_base = OTHER; note = 2'-deoxy 5-methylcytidine
  modified_base 15: mod_base = OTHER; note = 2'-deoxy 5-methylcytidine
  modified_base 16: mod_base = OTHER; note = 2'-O-methoxyethyl guanosine
  modified_base 17: mod_base = OTHER; note = 2'-O-methoxyethyl guanosine
  modified_base 18: mod_base = OTHER; note = 2'-O-methoxyethyl guanosine
  modified_base 19: mod_base = OTHER; note = 2'-O-methoxyethyl adenosine
  modified_base 20: mod_base = OTHER; note = 2'-O-methoxyethyl 5-methylcytidine
  misc_feature 1..5: note = RNA
  misc_feature 6..15: note = DNA
  misc_feature 16..20: note = RNA
ggattcagcgccgacgggac

SEQ ID NO: 538 - DNA, 30 bp, synthetic construct
  source 1..30: mol_type = other DNA
  modified_base 1: mod_base = OTHER; note = 2'-O-methoxyethyl 5-methylcytidine
  modified_base 2: mod_base = OTHER; note = 2'-O-methoxyethyl 5-methylcytidine
  modified_base 3: mod_base = OTHER; note = 2'-O-methoxyethyl guanosine
  modified_base 4: mod_base = OTHER; note = 2'-O-methoxyethyl 5-methylcytidine
  modified_base 5: mod_base = OTHER; note = 2'-O-methoxyethyl adenosine
  modified_base 11: mod_base = OTHER; note = 2'-deoxy 5-methylcytidine
  modified_base 14: mod_base = OTHER; note = 2'-deoxy 5-methylcytidine
  modified_base 16: mod_base = OTHER; note = 2'-deoxy 5-methylcytidine
  modified_base 17: mod_base = OTHER; note = 2'-deoxy 5-methylcytidine
  modified_base 20: mod_base = OTHER; note = 2'-deoxy 5-methylcytidine
  modified_base 25: mod_base = OTHER; note = 2'-deoxy 5-methylcytidine
  modified_base 26: mod_base = OTHER; note = 2'-O-methoxyethyl guanosine
  modified_base 27: mod_base = OTHER; note = 2'-O-methoxyethyl uridine
  modified_base 28: mod_base = OTHER; note = 2'-O-methoxyethyl adenosine
  modified_base 29: mod_base = OTHER; note = 2'-O-methoxyethyl adenosine
  modified_base 30: mod_base = OTHER; note = 2'-O-methoxyethyl adenosine
  misc_feature 1..5: note = RNA
  misc_feature 6..25: note = DNA
  misc_feature 26..30: note = RNA
ccgcaggattcagcgccgacgggacgtaaa

SEQ ID NO: 539 - DNA, 25 bp, synthetic construct
  source 1..25: mol_type = other DNA
  modified_base 1: mod_base = OTHER; note = 2'-O-methoxyethyl 5-methylcytidine
  modified_base 2: mod_base = OTHER; note = 2'-O-methoxyethyl 5-methylcytidine
  modified_base 3: mod_base = OTHER; note = 2'-O-methoxyethyl 5-methylcytidine
  modified_base 4: mod_base = OTHER; note = 2'-O-methoxyethyl 5-methylcytidine
  modified_base 5: mod_base = OTHER; note = 2'-O-methoxyethyl thymidine
  modified_base 21: mod_base = OTHER; note = 2'-O-methoxyethyl guanosine
  modified_base 22: mod_base = OTHER; note = 2'-O-methoxyethyl thymidine
  modified_base 23: mod_base = OTHER; note = 2'-O-methoxyethyl 5-methylcytidine
  modified_base 24: mod_base = OTHER; note = 2'-O-methoxyethyl 5-methylcytidine
  modified_base 25: mod_base = OTHER; note = 2'-O-methoxyethyl adenosine
  misc_feature 1..5: note = RNA
  misc_feature 6..20: note = DNA
  misc_feature 21..25: note = RNA
cccctagaaaattgagagaagtcca

SEQ ID NO: 540 - DNA, 30 bp, synthetic construct
  source 1..30: mol_type = other DNA
  modified_base 1: mod_base = OTHER; note = 2'-O-methoxyethyl 5-methylcytidine
  modified_base 2: mod_base = OTHER; note = 2'-O-methoxyethyl 5-methylcytidine
  modified_base 3: mod_base = OTHER; note = 2'-O-methoxyethyl 5-methylcytidine
  modified_base 4: mod_base = OTHER; note = 2'-O-methoxyethyl 5-methylcytidine
  modified_base 5: mod_base = OTHER; note = 2'-O-methoxyethyl thymidine
  modified_base 23: mod_base = OTHER; note = 2'-deoxy 5-methylcytidine
  modified_base 24: mod_base = OTHER; note = 2'-deoxy 5-methylcytidine
  modified_base 26: mod_base = OTHER; note = 2'-O-methoxyethyl 5-methylcytidine
  modified_base 27: mod_base = OTHER; note = 2'-O-methoxyethyl 5-methylcytidine
  modified_base 28: mod_base = OTHER; note = 2'-O-methoxyethyl adenosine
  modified_base 29: mod_base = OTHER; note = 2'-O-methoxyethyl 5-methylcytidine
  modified_base 30: mod_base = OTHER; note = 2'-O-methoxyethyl guanosine
  misc_feature 1..5: note = RNA
  misc_feature 6..25: note = DNA
  misc_feature 26..30: note = RNA
cccctagaaaattgagagaagtccaccacg

SEQ ID NO: 541 - DNA, 25 bp, synthetic construct
  source 1..25: mol_type = other DNA
  modified_base 1: mod_base = OTHER; note = 2'-O-methoxyethyl adenosine
  modified_base 2: mod_base = OTHER; note = 2'-O-methoxyethyl guanosine
  modified_base 3: mod_base = OTHER; note = 2'-O-methoxyethyl adenosine
  modified_base 4: mod_base = OTHER; note = 2'-O-methoxyethyl adenosine
  modified_base 5: mod_base = OTHER; note = 2'-O-methoxyethyl adenosine
  modified_base 18: mod_base = OTHER; note = 2'-deoxy 5-methylcytidine
  modified_base 19: mod_base = OTHER; note = 2'-deoxy 5-methylcytidine
  modified_base 21: mod_base = OTHER; note = 2'-O-methoxyethyl 5-methylcytidine
  modified_base 22: mod_base = OTHER; note = 2'-O-methoxyethyl 5-methylcytidine
  modified_base 23: mod_base = OTHER; note = 2'-O-methoxyethyl adenosine
  modified_base 24: mod_base = OTHER; note = 2'-O-methoxyethyl 5-methylcytidine
  modified_base 25: mod_base = OTHER; note = 2'-O-methoxyethyl guanosine
  misc_feature 1..5: note = RNA
  misc_feature 6..20: note = DNA
  misc_feature 21..25: note = RNA
agaaaattgagagaagtccaccacg

SEQ ID NO: 542 - DNA, 30 bp, synthetic construct
  source 1..30: mol_type = other DNA
  modified_base 1: mod_base = OTHER; note = 2'-O-methoxyethyl adenosine
  modified_base 2: mod_base = OTHER; note = 2'-O-methoxyethyl guanosine
  modified_base 3: mod_base = OTHER; note = 2'-O-methoxyethyl adenosine
  modified_base 4: mod_base = OTHER; note = 2'-O-methoxyethyl adenosine
  modified_base 5: mod_base = OTHER; note = 2'-O-methoxyethyl adenosine
  modified_base 18: mod_base = OTHER; note = 2'-deoxy 5-methylcytidine
  modified_base 19: mod_base = OTHER; note = 2'-deoxy 5-methylcytidine
  modified_base 21: mod_base = OTHER; note = 2'-deoxy 5-methylcytidine
  modified_base 22: mod_base = OTHER; note = 2'-deoxy 5-methylcytidine
  modified_base 24: mod_base = OTHER; note = 2'-deoxy 5-methylcytidine
  modified_base 26: mod_base = OTHER; note = 2'-O-methoxyethyl adenosine
  modified_base 27: mod_base = OTHER; note = 2'-O-methoxyethyl guanosine
  modified_base 28: mod_base = OTHER; note = 2'-O-methoxyethyl thymidine
  modified_base 29: mod_base = OTHER; note = 2'-O-methoxyethyl 5-methylcytidine
  modified_base 30: mod_base = OTHER; note = 2'-O-methoxyethyl thymidine
  misc_feature 1..5: note = RNA
  misc_feature 6..25: note = DNA
  misc_feature 26..30: note = RNA
agaaaattgagagaagtccaccacgagtct

SEQ ID NO: 543 - DNA, 20 bp, synthetic construct
  source 1..20: mol_type = other DNA
  modified_base 1: mod_base = OTHER; note = 2'-O-methoxyethyl thymidine
  modified_base 2: mod_base = OTHER; note = 2'-O-methoxyethyl guanosine
  modified_base 3: mod_base = OTHER; note = 2'-O-methoxyethyl adenosine
  modified_base 4: mod_base = OTHER; note = 2'-O-methoxyethyl adenosine
  modified_base 5: mod_base = OTHER; note = 2'-O-methoxyethyl guanosine
  modified_base 6: mod_base = OTHER; note = 2'-deoxy 5-methylcytidine
  modified_base 13: mod_base = OTHER; note = 2'-deoxy 5-methylcytidine
  modified_base 15: mod_base = OTHER; note = 2'-deoxy 5-methylcytidine
  modified_base 16: mod_base = OTHER; note = 2'-O-methoxyethyl adenosine
  modified_base 17: mod_base = OTHER; note = 2'-O-methoxyethyl 5-methylcytidine
  modified_base 18: mod_base = OTHER; note = 2'-O-methoxyethyl guanosine
  modified_base 19: mod_base = OTHER; note = 2'-O-methoxyethyl guanosine
  modified_base 20: mod_base = OTHER; note = 2'-O-methoxyethyl thymidine
  misc_feature 1..5: note = RNA
  misc_feature 6..15: note = DNA
  misc_feature 16..20: note = RNA
tgaagcgaagtgcacacggt

SEQ ID NO: 544 - DNA, 20 bp, synthetic construct
  source 1..20: mol_type = other DNA
  modified_base 1: mod_base = OTHER; note = 2'-O-methoxyethyl guanosine
  modified_base 2: mod_base = OTHER; note = 2'-O-methoxyethyl adenosine
  modified_base 3: mod_base = OTHER; note = 2'-O-methoxyethyl adenosine
  modified_base 4: mod_base = OTHER; note = 2'-O-methoxyethyl guanosine
  modified_base 5: mod_base = OTHER; note = 2'-O-methoxyethyl 5-methylcytidine
  modified_base 12: mod_base = OTHER; note = 2'-deoxy 5-methylcytidine
  modified_base 14: mod_base = OTHER; note = 2'-deoxy 5-methylcytidine
  modified_base 16: mod_base = OTHER; note = 2'-O-methoxyethyl 5-methylcytidine
  modified_base 17: mod_base = OTHER; note = 2'-O-methoxyethyl guanosine
  modified_base 18: mod_base = OTHER; note = 2'-O-methoxyethyl guanosine
  modified_base 19: mod_base = OTHER; note = 2'-O-methoxyethyl thymidine
  modified_base 20: mod_base = OTHER; note = 2'-O-methoxyethyl 5-methylcytidine
  misc_feature 1..5: note = RNA
  misc_feature 6..15: note = DNA
  misc_feature 16..20: note = RNA
gaagcgaagtgcacacggtc

SEQ ID NO: 545 - DNA, 20 bp, synthetic construct
  source 1..20: mol_type = other DNA
  modified_base 1: mod_base = OTHER; note = 2'-O-methoxyethyl adenosine
  modified_base 2: mod_base = OTHER; note = 2'-O-methoxyethyl adenosine
  modified_base 3: mod_base = OTHER; note = 2'-O-methoxyethyl guanosine
  modified_base 4: mod_base = OTHER; note = 2'-O-methoxyethyl 5-methylcytidine
  modified_base 5: mod_base = OTHER; note = 2'-O-methoxyethyl guanosine
  modified_base 11: mod_base = OTHER; note = 2'-deoxy 5-methylcytidine
  modified_base 13: mod_base = OTHER; note = 2'-deoxy 5-methylcytidine
  modified_base 15: mod_base = OTHER; note = 2'-deoxy 5-methylcytidine
  modified_base 16: mod_base = OTHER; note = 2'-O-methoxyethyl guanosine
  modified_base 17: mod_base = OTHER; note = 2'-O-methoxyethyl guanosine
  modified_base 18: mod_base = OTHER; note = 2'-O-methoxyethyl thymidine
  modified_base 19: mod_base = OTHER; note = 2'-O-methoxyethyl 5-methylcytidine
  modified_base 20: mod_base = OTHER; note = 2'-O-methoxyethyl 5-methylcytidine
  misc_feature 1..5: note = RNA
  misc_feature 6..15: note = DNA
  misc_feature 16..20: note = RNA
aagcgaagtgcacacggtcc

SEQ ID NO: 546 - DNA, 20 bp, synthetic construct
  source 1..20: mol_type = other DNA
  modified_base 1: mod_base = OTHER; note = 2'-O-methoxyethyl adenosine
  modified_base 2: mod_base = OTHER; note = 2'-O-methoxyethyl guanosine
  modified_base 3: mod_base = OTHER; note = 2'-O-methoxyethyl 5-methylcytidine
  modified_base 4: mod_base = OTHER; note = 2'-O-methoxyethyl guanosine
  modified_base 5: mod_base = OTHER; note = 2'-O-methoxyethyl adenosine
  modified_base 10: mod_base = OTHER; note = 2'-deoxy 5-methylcytidine
  modified_base 12: mod_base = OTHER; note = 2'-deoxy 5-methylcytidine
  modified_base 14: mod_base = OTHER; note = 2'-deoxy 5-methylcytidine
  modified_base 16: mod_base = OTHER; note = 2'-O-methoxyethyl guanosine
  modified_base 17: mod_base = OTHER; note = 2'-O-methoxyethyl thymidine
  modified_base 18: mod_base = OTHER; note = 2'-O-methoxyethyl 5-methylcytidine
  modified_base 19: mod_base = OTHER; note = 2'-O-methoxyethyl 5-methylcytidine
  modified_base 20: mod_base = OTHER; note = 2'-O-methoxyethyl guanosine
  misc_feature 1..5: note = RNA
  misc_feature 6..15: note = DNA
  misc_feature 16..20: note = RNA
agcgaagtgcacacggtccg

SEQ ID NO: 547 - DNA, 20 bp, synthetic construct
  source 1..20: mol_type = other DNA
  modified_base 1: mod_base = OTHER; note = 2'-O-methoxyethyl guanosine
  modified_base 2: mod_base = OTHER; note = 2'-O-methoxyethyl 5-methylcytidine
  modified_base 3: mod_base = OTHER; note = 2'-O-methoxyethyl guanosine
  modified_base 4: mod_base = OTHER; note = 2'-O-methoxyethyl adenosine
  modified_base 5: mod_base = OTHER; note = 2'-O-methoxyethyl adenosine
  modified_base 9: mod_base = OTHER; note = 2'-deoxy 5-methylcytidine
  modified_base 11: mod_base = OTHER; note = 2'-deoxy 5-methylcytidine
  modified_base 13: mod_base = OTHER; note = 2'-deoxy 5-methylcytidine
  modified_base 16: mod_base = OTHER; note = 2'-O-methoxyethyl thymidine
  modified_base 17: mod_base = OTHER; note = 2'-O-methoxyethyl 5-methylcytidine
  modified_base 18: mod_base = OTHER; note = 2'-O-methoxyethyl 5-methylcytidine
  modified_base 19: mod_base = OTHER; note = 2'-O-methoxyethyl guanosine
  modified_base 20: mod_base = OTHER; note = 2'-O-methoxyethyl guanosine
  misc_feature 1..5: note = RNA
  misc_feature 6..15: note = DNA
  misc_feature 16..20: note = RNA
gcgaagtgcacacggtccgg

SEQ ID NO: 548 - DNA, 26 bp, synthetic construct
  source 1..26: mol_type = other DNA
  modified_base 1: mod_base = OTHER; note = 2'-O-methoxyethyl adenosine
  modified_base 2: mod_base = OTHER; note = 2'-O-methoxyethyl thymidine
  modified_base 3: mod_base = OTHER; note = 2'-O-methoxyethyl guanosine
  modified_base 4: mod_base = OTHER; note = 2'-O-methoxyethyl guanosine
  modified_base 5: mod_base = OTHER; note = 2'-O-methoxyethyl 5-methylcytidine
  modified_base 6: mod_base = OTHER; note = 2'-O-methoxyethyl adenosine
  modified_base 7: mod_base = OTHER; note = 2'-O-methoxyethyl 5-methylcytidine
  modified_base 8: mod_base = OTHER; note = 2'-O-methoxyethyl thymidine
  modified_base 15: mod_base = OTHER; note = 2'-deoxy 5-methylcytidine
  modified_base 19: mod_base = OTHER; note = 2'-O-methoxyethyl guanosine
  modified_base 20: mod_base = OTHER; note = 2'-O-methoxyethyl 5-methylcytidine
  modified_base 21: mod_base = OTHER; note = 2'-O-methoxyethyl 5-methylcytidine
  modified_base 22: mod_base = OTHER; note = 2'-O-methoxyethyl adenosine
  modified_base 23: mod_base = OTHER; note = 2'-O-methoxyethyl guanosine
  modified_base 24: mod_base = OTHER; note = 2'-O-methoxyethyl guanosine
  modified_base 25: mod_base = OTHER; note = 2'-O-methoxyethyl adenosine
  modified_base 26: mod_base = OTHER; note = 2'-O-methoxyethyl guanosine
  misc_feature 1..8: note = RNA
  misc_feature 9..18: note = DNA
  misc_feature 19..26: note = RNA
atggcactagtaaactgagccaggag

SEQ ID NO: 549 - DNA, 24 bp, synthetic construct
  source 1..24: mol_type = other DNA
  modified_base 1: mod_base = OTHER; note = 2'-O-methoxyethyl thymidine
  modified_base 2: mod_base = OTHER; note = 2'-O-methoxyethyl guanosine
  modified_base 3: mod_base = OTHER; note = 2'-O-methoxyethyl guanosine
  modified_base 4: mod_base = OTHER; note = 2'-O-methoxyethyl 5-methylcytidine
  modified_base 5: mod_base = OTHER; note = 2'-O-methoxyethyl adenosine
  modified_base 6: mod_base = OTHER; note = 2'-O-methoxyethyl 5-methylcytidine
  modified_base 7: mod_base = OTHER; note = 2'-O-methoxyethyl thymidine
  modified_base 14: mod_base = OTHER; note = 2'-deoxy 5-methylcytidine
  modified_base 18: mod_base = OTHER; note = 2'-O-methoxyethyl guanosine
  modified_base 19: mod_base = OTHER; note = 2'-O-methoxyethyl 5-methylcytidine
  modified_base 20: mod_base = OTHER; note = 2'-O-methoxyethyl 5-methylcytidine
  modified_base 21: mod_base = OTHER; note = 2'-O-methoxyethyl adenosine
  modified_base 22: mod_base = OTHER; note = 2'-O-methoxyethyl guanosine
  modified_base 23: mod_base = OTHER; note = 2'-O-methoxyethyl guanosine
  modified_base 24: mod_base = OTHER; note = 2'-O-methoxyethyl adenosine
  misc_feature 1..7: note = RNA
  misc_feature 8..17: note = DNA
  misc_feature 18..24: note = RNA
tggcactagtaaactgagccagga

SEQ ID NO: 550 - DNA, 22 bp, synthetic construct
  source 1..22: mol_type = other DNA
  modified_base 1: mod_base = OTHER; note = 2'-O-methoxyethyl guanosine
  modified_base 2: mod_base = OTHER; note = 2'-O-methoxyethyl guanosine
  modified_base 3: mod_base = OTHER; note = 2'-O-methoxyethyl 5-methylcytidine
  modified_base 4: mod_base = OTHER; note = 2'-O-methoxyethyl adenosine
  modified_base 5: mod_base = OTHER; note = 2'-O-methoxyethyl 5-methylcytidine
  modified_base 6: mod_base = OTHER; note = 2'-O-methoxyethyl thymidine
  modified_base 13: mod_base = OTHER; note = 2'-deoxy 5-methylcytidine
  modified_base 17: mod_base = OTHER; note = 2'-O-methoxyethyl guanosine
  modified_base 18: mod_base = OTHER; note = 2'-O-methoxyethyl 5-methylcytidine
  modified_base 19: mod_base = OTHER; note = 2'-O-methoxyethyl 5-methylcytidine
  modified_base 20: mod_base = OTHER; note = 2'-O-methoxyethyl adenosine
  modified_base 21: mod_base = OTHER; note = 2'-O-methoxyethyl guanosine
  modified_base 22: mod_base = OTHER; note = 2'-O-methoxyethyl guanosine
  misc_feature 1..6: note = RNA
  misc_feature 7..16: note = DNA
  misc_feature 17..22: note = RNA
ggcactagtaaactgagccagg

SEQ ID NO: 551 - DNA, 18 bp, synthetic construct
  source 1..18: mol_type = other DNA
  modified_base 1: mod_base = OTHER; note = 2'-O-methoxyethyl 5-methylcytidine
  modified_base 2: mod_base = OTHER; note = 2'-O-methoxyethyl adenosine
  modified_base 3: mod_base = OTHER; note = 2'-O-methoxyethyl 5-methylcytidine
  modified_base 4: mod_base = OTHER; note = 2'-O-methoxyethyl thymidine
  modified_base 11: mod_base = OTHER; note = 2'-deoxy 5-methylcytidine
  modified_base 15: mod_base = OTHER; note = 2'-O-methoxyethyl guanosine
  modified_base 16: mod_base = OTHER; note = 2'-O-methoxyethyl 5-methylcytidine
  modified_base 17: mod_base = OTHER; note = 2'-O-methoxyethyl 5-methylcytidine
  modified_base 18: mod_base = OTHER; note = 2'-O-methoxyethyl adenosine
  misc_feature 1..4: note = RNA
  misc_feature 5..14: note = DNA
  misc_feature 15..18: note = RNA
cactagtaaactgagcca

SEQ ID NO: 552 - DNA, 20 bp, synthetic construct
  source 1..20: mol_type = other DNA
  modified_base 1: mod_base = OTHER; note = 2'-O-methoxyethyl guanosine
  modified_base 2: mod_base = OTHER; note = 2'-O-methoxyethyl 5-methylcytidine
  modified_base 3: mod_base = OTHER; note = 2'-O-methoxyethyl adenosine
  modified_base 4: mod_base = OTHER; note = 2'-O-methoxyethyl 5-methylcytidine
  modified_base 5: mod_base = OTHER; note = 2'-O-methoxyethyl thymidine
  modified_base 6: mod_base = OTHER; note = 2'-O-methoxyethyl adenosine
  modified_base 7: mod_base = OTHER; note = 2'-O-methoxyethyl guanosine
  modified_base 8: mod_base = OTHER; note = 2'-O-methoxyethyl thymidine
  modified_base 9: mod_base = OTHER; note = 2'-O-methoxyethyl adenosine
  modified_base 10: mod_base = OTHER; note = 2'-O-methoxyethyl adenosine
  modified_base 11: mod_base = OTHER; note = 2'-O-methoxyethyl adenosine
  modified_base 12: mod_base = OTHER; note = 2'-O-methoxyethyl 5-methylcytidine
  modified_base 13: mod_base = OTHER; note = 2'-O-methoxyethyl thymidine
  modified_base 14: mod_base = OTHER; note = 2'-O-methoxyethyl guanosine
  modified_base 15: mod_base = OTHER; note = 2'-O-methoxyethyl adenosine
  modified_base 16: mod_base = OTHER; note = 2'-O-methoxyethyl guanosine
  modified_base 17: mod_base = OTHER; note = 2'-O-methoxyethyl 5-methylcytidine
  modified_base 18: mod_base = OTHER; note = 2'-O-methoxyethyl 5-methylcytidine
  modified_base 19: mod_base = OTHER; note = 2'-O-methoxyethyl adenosine
  modified_base 20: mod_base = OTHER; note = 2'-O-methoxyethyl guanosine
  misc_feature 1..20: note = RNA
gcactagtaaactgagccag

SEQ ID NO: 553 - DNA, 20 bp, synthetic construct
  source 1..20: mol_type = other DNA
  modified_base 1: mod_base = OTHER; note = 2'-O-methoxyethyl adenosine
  modified_base 2: mod_base = OTHER; note = 2'-O-methoxyethyl guanosine
  modified_base 3: mod_base = OTHER; note = 2'-O-methoxyethyl adenosine
  modified_base 4: mod_base = OTHER; note = 2'-O-methoxyethyl 5-methylcytidine
  modified_base 5: mod_base = OTHER; note = 2'-O-methoxyethyl thymidine
  modified_base 6: mod_base = OTHER; note = 2'-deoxy 5-methylcytidine
  modified_base 9: mod_base = OTHER; note = 2'-deoxy 5-methylcytidine
  modified_base 16: mod_base = OTHER; note = 2'-O-methoxyethyl guanosine
  modified_base 17: mod_base = OTHER; note = 2'-O-methoxyethyl thymidine
  modified_base 18: mod_base = OTHER; note = 2'-O-methoxyethyl guanosine
  modified_base 19: mod_base = OTHER; note = 2'-O-methoxyethyl adenosine
  modified_base 20: mod_base = OTHER; note = 2'-O-methoxyethyl guanosine
  misc_feature 1..5: note = RNA
  misc_feature 6..15: note = DNA
  misc_feature 16..20: note = RNA
agactctgcggtattgtgag

SEQ ID NO: 554 - DNA, 20 bp, synthetic construct
  source 1..20: mol_type = other DNA
  modified_base 1: mod_base = OTHER; note = 2'-O-methoxyethyl guanosine
  modified_base 2: mod_base = OTHER; note = 2'-O-methoxyethyl adenosine
  modified_base 3: mod_base = OTHER; note = 2'-O-methoxyethyl 5-methylcytidine
  modified_base 4: mod_base = OTHER; note = 2'-O-methoxyethyl thymidine
  modified_base 5: mod_base = OTHER; note = 2'-O-methoxyethyl 5-methylcytidine
  modified_base 8: mod_base = OTHER; note = 2'-deoxy 5-methylcytidine
  modified_base 16: mod_base = OTHER; note = 2'-O-methoxyethyl thymidine
  modified_base 17: mod_base = OTHER; note = 2'-O-methoxyethyl guanosine
  modified_base 18: mod_base = OTHER; note = 2'-O-methoxyethyl adenosine
  modified_base 19: mod_base = OTHER; note = 2'-O-methoxyethyl guanosine
  modified_base 20: mod_base = OTHER; note = 2'-O-methoxyethyl guanosine
  misc_feature 1..5: note = RNA
  misc_feature 6..15: note = DNA
  misc_feature 16..20: note = RNA
gactctgcggtattgtgagg

SEQ ID NO: 555 - DNA, 20 bp, synthetic construct
  source 1..20: mol_type = other DNA
  modified_base 1: mod_base = OTHER; note = 2'-O-methoxyethyl adenosine
  modified_base 2: mod_base = OTHER; note = 2'-O-methoxyethyl 5-methylcytidine
  modified_base 3: mod_base = OTHER; note = 2'-O-methoxyethyl thymidine
  modified_base 4: mod_base = OTHER; note = 2'-O-methoxyethyl 5-methylcytidine
  modified_base 5: mod_base = OTHER; note = 2'-O-methoxyethyl thymidine
  modified_base 7: mod_base = OTHER; note = 2'-deoxy 5-methylcytidine
  modified_base 16: mod_base = OTHER; note = 2'-O-methoxyethyl guanosine
  modified_base 17: mod_base = OTHER; note = 2'-O-methoxyethyl adenosine
  modified_base 18: mod_base = OTHER; note = 2'-O-methoxyethyl guanosine
  modified_base 19: mod_base = OTHER; note = 2'-O-methoxyethyl guanosine
  modified_base 20: mod_base = OTHER; note = 2'-O-methoxyethyl adenosine
  misc_feature 1..5: note = RNA
  misc_feature 6..15: note = DNA
  misc_feature 16..20: note = RNA
actctgcggtattgtgagga

SEQ ID NO: 556 - DNA, 20 bp, synthetic construct
  source 1..20: mol_type = other DNA
  modified_base 1: mod_base = OTHER; note = 2'-O-methoxyethyl 5-methylcytidine
  modified_base 2: mod_base = OTHER; note = 2'-O-methoxyethyl thymidine
  modified_base 3: mod_base = OTHER; note = 2'-O-methoxyethyl 5-methylcytidine
  modified_base 4: mod_base = OTHER; note = 2'-O-methoxyethyl thymidine
  modified_base 5: mod_base = OTHER; note = 2'-O-methoxyethyl guanosine
  modified_base 6: mod_base = OTHER; note = 2'-deoxy 5-methylcytidine
  modified_base 16: mod_base = OTHER; note = 2'-O-methoxyethyl adenosine
  modified_base 17: mod_base = OTHER; note = 2'-O-methoxyethyl guanosine
  modified_base 18: mod_base = OTHER; note = 2'-O-methoxyethyl guanosine
  modified_base 19: mod_base = OTHER; note = 2'-O-methoxyethyl adenosine
  modified_base 20: mod_base = OTHER; note = 2'-O-methoxyethyl thymidine
  misc_feature 1..5: note = RNA
  misc_feature 6..15: note = DNA
  misc_feature 16..20: note = RNA
ctctgcggtattgtgaggat

SEQ ID NO: 557 - DNA, 20 bp, synthetic construct
  source 1..20: mol_type = other DNA
  modified_base 1: mod_base = OTHER; note = 2'-O-methoxyethyl thymidine
  modified_base 2: mod_base = OTHER; note = 2'-O-methoxyethyl 5-methylcytidine
  modified_base 3: mod_base = OTHER; note = 2'-O-methoxyethyl thymidine
  modified_base 4: mod_base = OTHER; note = 2'-O-methoxyethyl guanosine
  modified_base 5: mod_base = OTHER; note = 2'-O-methoxyethyl 5-methylcytidine
  modified_base 16: mod_base = OTHER; note = 2'-O-methoxyethyl guanosine
  modified_base 17: mod_base = OTHER; note = 2'-O-methoxyethyl guanosine
  modified_base 18: mod_base = OTHER; note = 2'-O-methoxyethyl adenosine
  modified_base 19: mod_base = OTHER; note = 2'-O-methoxyethyl thymidine
  modified_base 20: mod_base = OTHER; note = 2'-O-methoxyethyl thymidine
  misc_feature 1..5: note = RNA
  misc_feature 6..15: note = DNA
  misc_feature 16..20: note = RNA
tctgcggtattgtgaggatt

SEQ ID NO: 558 - DNA, 20 bp, synthetic construct
  source 1..20: mol_type = other DNA
  modified_base 1: mod_base = OTHER; note = 2'-O-methoxyethyl 5-methylcytidine
  modified_base 2: mod_base = OTHER; note = 2'-O-methoxyethyl thymidine
  modified_base 3: mod_base = OTHER; note = 2'-O-methoxyethyl guanosine
  modified_base 4: mod_base = OTHER; note = 2'-O-methoxyethyl 5-methylcytidine
  modified_base 5: mod_base = OTHER; note = 2'-O-methoxyethyl guanosine
  modified_base 16: mod_base = OTHER; note = 2'-O-methoxyethyl guanosine
  modified_base 17: mod_base = OTHER; note = 2'-O-methoxyethyl adenosine
  modified_base 18: mod_base = OTHER; note = 2'-O-methoxyethyl thymidine
  modified_base 19: mod_base = OTHER; note = 2'-O-methoxyethyl thymidine
  modified_base 20: mod_base = OTHER; note = 2'-O-methoxyethyl 5-methylcytidine
  misc_feature 1..5: note = RNA
  misc_feature 6..15: note = DNA
  misc_feature 16..20: note = RNA
ctgcggtattgtgaggattc

SEQ ID NO: 559 - DNA, 20 bp, synthetic construct
  source 1..20: mol_type = other DNA
  modified_base 1: mod_base = OTHER; note = 2'-O-methoxyethyl thymidine
  modified_base 2: mod_base = OTHER; note = 2'-O-methoxyethyl guanosine
  modified_base 3: mod_base = OTHER; note = 2'-O-methoxyethyl 5-methylcytidine
  modified_base 4: mod_base = OTHER; note = 2'-O-methoxyethyl guanosine
  modified_base 5: mod_base = OTHER; note = 2'-O-methoxyethyl guanosine
  modified_base 16: mod_base = OTHER; note = 2'-O-methoxyethyl adenosine
  modified_base 17: mod_base = OTHER; note = 2'-O-methoxyethyl thymidine
  modified_base 18: mod_base = OTHER; note = 2'-O-methoxyethyl thymidine
  modified_base 19: mod_base = OTHER; note = 2'-O-methoxyethyl 5-methylcytidine
  modified_base 20: mod_base = OTHER; note = 2'-O-methoxyethyl thymidine
  misc_feature 1..5: note = RNA
  misc_feature 6..15: note = DNA
  misc_feature 16..20: note = RNA
tgcggtattgtgaggattct

SEQ ID NO: 560 - DNA, 20 bp, synthetic construct
  source 1..20: mol_type = other DNA
  modified_base 1: mod_base = OTHER; note = 2'-O-methoxyethyl guanosine
  modified_base 2: mod_base = OTHER; note = 2'-O-methoxyethyl 5-methylcytidine
  modified_base 3: mod_base = OTHER; note = 2'-O-methoxyethyl guanosine
  modified_base 4: mod_base = OTHER; note = 2'-O-methoxyethyl guanosine
  modified_base 5: mod_base = OTHER; note = 2'-O-methoxyethyl thymidine
  modified_base 16: mod_base = OTHER; note = 2'-O-methoxyethyl thymidine
  modified_base 17: mod_base = OTHER; note = 2'-O-methoxyethyl thymidine
  modified_base 18: mod_base = OTHER; note = 2'-O-methoxyethyl 5-methylcytidine
  modified_base 19: mod_base = OTHER; note = 2'-O-methoxyethyl thymidine
  modified_base 20: mod_base = OTHER; note = 2'-O-methoxyethyl thymidine
  misc_feature 1..5: note = RNA
  misc_feature 6..15: note = DNA
  misc_feature 16..20: note = RNA
gcggtattgtgaggattctt

SEQ ID NO: 561 - DNA, 20 bp, synthetic construct
  source 1..20: mol_type = other DNA
  modified_base 1: mod_base = OTHER; note = 2'-O-methoxyethyl 5-methylcytidine
  modified_base 2: mod_base = OTHER; note = 2'-O-methoxyethyl guanosine
  modified_base 3: mod_base = OTHER; note = 2'-O-methoxyethyl guanosine
  modified_base 4: mod_base = OTHER; note = 2'-O-methoxyethyl thymidine
  modified_base 5: mod_base = OTHER; note = 2'-O-methoxyethyl adenosine
  modified_base 16: mod_base = OTHER; note = 2'-O-methoxyethyl thymidine
  modified_base 17: mod_base = OTHER; note = 2'-O-methoxyethyl 5-methylcytidine
  modified_base 18: mod_base = OTHER; note = 2'-O-methoxyethyl thymidine
  modified_base 19: mod_base = OTHER; note = 2'-O-methoxyethyl thymidine
  modified_base 20: mod_base = OTHER; note = 2'-O-methoxyethyl guanosine
  misc_feature 1..5: note = RNA
  misc_feature 6..15: note = DNA
  misc_feature 16..20: note = RNA
cggtattgtgaggattcttg

SEQ ID NO: 562 - DNA, 20 bp, synthetic construct
  source 1..20: mol_type = other DNA
  modified_base 1: mod_base = OTHER; note = 2'-O-methoxyethyl guanosine
  modified_base 2: mod_base = OTHER; note = 2'-O-methoxyethyl guanosine
  modified_base 3: mod_base = OTHER; note = 2'-O-methoxyethyl 5-methylcytidine
  modified_base 4: mod_base = OTHER; note = 2'-O-methoxyethyl adenosine
  modified_base 5: mod_base = OTHER; note = 2'-O-methoxyethyl 5-methylcytidine
  modified_base 13: mod_base = OTHER; note = 2'-deoxy 5-methylcytidine
  modified_base 16: mod_base = OTHER; note = 2'-O-methoxyethyl adenosine
  modified_base 17: mod_base = OTHER; note = 2'-O-methoxyethyl guanosine
  modified_base 18: mod_base = OTHER; note = 2'-O-methoxyethyl 5-methylcytidine
  modified_base 19: mod_base = OTHER; note = 2'-O-methoxyethyl 5-methylcytidine
  modified_base 20: mod_base = OTHER; note = 2'-O-methoxyethyl adenosine
  misc_feature 1..5: note = RNA
  misc_feature 6..15: note = DNA
  misc_feature 16..20: note = RNA
ggcactagtaaactgagcca

SEQ ID NO: 563 - DNA, 20 bp, synthetic construct
  source 1..20: mol_type = other DNA
  modified_base 1: mod_base = OTHER; note = 2'-O-methoxyethyl guanosine
  modified_base 2: mod_base = OTHER; note = 2'-O-methoxyethyl 5-methylcytidine
  modified_base 3: mod_base = OTHER; note = 2'-O-methoxyethyl adenosine
  modified_base 4: mod_base = OTHER; note = 2'-O-methoxyethyl 5-methylcytidine
  modified_base 5: mod_base = OTHER; note = 2'-O-methoxyethyl thymidine
  modified_base 12: mod_base = OTHER; note = 2'-deoxy 5-methylcytidine
  modified_base 16: mod_base = OTHER; note = 2'-O-methoxyethyl guanosine
  modified_base 17: mod_base = OTHER; note = 2'-O-methoxyethyl 5-methylcytidine
  modified_base 18: mod_base = OTHER; note = 2'-O-methoxyethyl 5-methylcytidine
  modified_base 19: mod_base = OTHER; note = 2'-O-methoxyethyl adenosine
  modified_base 20: mod_base = OTHER; note = 2'-O-methoxyethyl guanosine
  misc_feature 1..5: note = RNA
  misc_feature 6..15: note = DNA
  misc_feature 16..20: note = RNA
gcactagtaaactgagccag

SEQ ID NO: 564 - DNA, 20 bp, synthetic construct
  source 1..20: mol_type = other DNA
  modified_base 1: mod_base = OTHER; note = 2'-O-methoxyethyl 5-methylcytidine
  modified_base 2: mod_base = OTHER; note = 2'-O-methoxyethyl adenosine
  modified_base 3: mod_base = OTHER; note = 2'-O-methoxyethyl 5-methylcytidine
  modified_base 4: mod_base = OTHER; note = 2'-O-methoxyethyl thymidine
  modified_base 5: mod_base = OTHER; note = 2'-O-methoxyethyl adenosine
  modified_base 11: mod_base = OTHER; note = 2'-deoxy 5-methylcytidine
  modified_base 16: mod_base = OTHER; note = 2'-O-methoxyethyl 5-methylcytidine
  modified_base 17: mod_base = OTHER; note = 2'-O-methoxyethyl 5-methylcytidine
  modified_base 18: mod_base = OTHER; note = 2'-O-methoxyethyl adenosine
  modified_base 19: mod_base = OTHER; note = 2'-O-methoxyethyl guanosine
  modified_base 20: mod_base = OTHER; note = 2'-O-methoxyethyl guanosine
  misc_feature 1..5: note = RNA
  misc_feature 6..15: note = DNA
  misc_feature 16..20: note = RNA
cactagtaaactgagccagg

SEQ ID NO: 565 - DNA, 20 bp, synthetic construct
  source 1..20: mol_type = other DNA
  modified_base 1: mod_base = OTHER; note = 2'-O-methoxyethyl adenosine
  modified_base 2: mod_base = OTHER; note = 2'-O-methoxyethyl 5-methylcytidine
  modified_base 3: mod_base = OTHER; note = 2'-O-methoxyethyl thymidine
  modified_base 4: mod_base = OTHER; note = 2'-O-methoxyethyl adenosine
  modified_base 5: mod_base = OTHER; note = 2'-O-methoxyethyl guanosine
  modified_base 10: mod_base = OTHER; note = 2'-deoxy 5-methylcytidine
  modified_base 15: mod_base = OTHER; note = 2'-deoxy 5-methylcytidine
  modified_base 16: mod_base = OTHER; note = 2'-O-methoxyethyl 5-methylcytidine
  modified_base 17: mod_base = OTHER; note = 2'-O-methoxyethyl adenosine
  modified_base 18: mod_base = OTHER; note = 2'-O-methoxyethyl guanosine
  modified_base 19: mod_base = OTHER; note = 2'-O-methoxyethyl guanosine
  modified_base 20: mod_base = OTHER; note = 2'-O-methoxyethyl adenosine
  misc_feature 1..5: note = RNA
  misc_feature 6..15: note = DNA
  misc_feature 16..20: note = RNA
actagtaaactgagccagga

SEQ ID NO: 566 - DNA, 20 bp, synthetic construct
  source 1..20: mol_type = other DNA
  modified_base 1: mod_base = OTHER; note = 2'-O-methoxyethyl thymidine
  modified_base 2: mod_base = OTHER; note = 2'-O-methoxyethyl thymidine
  modified_base 3: mod_base = OTHER; note = 2'-O-methoxyethyl 5-methylcytidine
  modified_base 4: mod_base = OTHER; note = 2'-O-methoxyethyl 5-methylcytidine
  modified_base 5: mod_base = OTHER; note = 2'-O-methoxyethyl guanosine
  modified_base 6: mod_base = OTHER; note = 2'-deoxy 5-methylcytidine
  modified_base 16: mod_base = OTHER; note = 2'-O-methoxyethyl 5-methylcytidine
  modified_base 17: mod_base = OTHER; note = 2'-O-methoxyethyl guanosine
  modified_base 18: mod_base = OTHER; note = 2'-O-methoxyethyl guanosine
  modified_base 19: mod_base = OTHER; note = 2'-O-methoxyethyl 5-methylcytidine
  modified_base 20: mod_base = OTHER; note = 2'-O-methoxyethyl adenosine
  misc_feature 1..5: note = RNA
  misc_feature 6..15: note = DNA
  misc_feature 16..20: note = RNA
ttccgcagtatggatcggca

SEQ ID NO: 567 - DNA, 20 bp, synthetic construct
  source 1..20: mol_type = other DNA
  modified_base 1: mod_base = OTHER; note = 2'-O-methoxyethyl thymidine
  modified_base 2: mod_base = OTHER; note = 2'-O-methoxyethyl 5-methylcytidine
  modified_base 3: mod_base = OTHER; note = 2'-O-methoxyethyl 5-methylcytidine
  modified_base 4: mod_base = OTHER; note = 2'-O-methoxyethyl guanosine
  modified_base 5: mod_base = OTHER; note = 2'-O-methoxyethyl 5-methylcytidine
  modified_base 15: mod_base = OTHER; note = 2'-deoxy 5-methylcytidine
  modified_base 16: mod_base = OTHER; note = 2'-O-methoxyethyl guanosine
  modified_base 17: mod_base = OTHER; note = 2'-O-methoxyethyl guanosine
  modified_base 18: mod_base = OTHER; note = 2'-O-methoxyethyl 5-methylcytidine
  modified_base 19: mod_base = OTHER; note = 2'-O-methoxyethyl adenosine
  modified_base 20: mod_base = OTHER; note = 2'-O-methoxyethyl guanosine
  misc_feature 1..5: note = RNA
  misc_feature 6..15: note = DNA
  misc_feature 16..20: note = RNA
tccgcagtatggatcggcag

SEQ ID NO: 568 - DNA, 20 bp, synthetic construct
  source 1..20: mol_type = other DNA
  modified_base 1: mod_base = OTHER; note = 2'-O-methoxyethyl 5-methylcytidine
  modified_base 2: mod_base = OTHER; note = 2'-O-methoxyethyl 5-methylcytidine
  modified_base 3: mod_base = OTHER; note = 2'-O-methoxyethyl guanosine
  modified_base 4: mod_base = OTHER; note = 2'-O-methoxyethyl 5-methylcytidine
  modified_base 5: mod_base = OTHER; note = 2'-O-methoxyethyl adenosine
  modified_base 14: mod_base = OTHER; note = 2'-deoxy 5-methylcytidine
  modified_base 16: mod_base = OTHER; note = 2'-O-methoxyethyl guanosine
  modified_base 17: mod_base = OTHER; note = 2'-O-methoxyethyl 5-methylcytidine
  modified_base 18: mod_base = OTHER; note = 2'-O-methoxyethyl adenosine
  modified_base 19: mod_base = OTHER; note = 2'-O-methoxyethyl guanosine
  modified_base 20: mod_base = OTHER; note = 2'-O-methoxyethyl adenosine
  misc_feature 1..5: note = RNA
  misc_feature 6..15: note = DNA
  misc_feature 16..20: note = RNA
ccgcagtatggatcggcaga

SEQ ID NO: 569 - DNA, 20 bp, synthetic construct
  source 1..20: mol_type = other DNA
  modified_base 1: mod_base = OTHER; note = 2'-O-methoxyethyl 5-methylcytidine
  modified_base 2: mod_base = OTHER; note = 2'-O-methoxyethyl guanosine
  modified_base 3: mod_base = OTHER; note = 2'-O-methoxyethyl 5-methylcytidine
  modified_base 4: mod_base = OTHER; note = 2'-O-methoxyethyl adenosine
  modified_base 5: mod_base = OTHER; note = 2'-O-methoxyethyl guanosine
  modified_base 13: mod_base = OTHER; note = 2'-deoxy 5-methylcytidine
  modified_base 16: mod_base = OTHER; note = 2'-O-methoxyethyl 5-methylcytidine
  modified_base 17: mod_base = OTHER; note = 2'-O-methoxyethyl adenosine
  modified_base 18: mod_base = OTHER; note = 2'-O-methoxyethyl guanosine
  modified_base 19: mod_base = OTHER; note = 2'-O-methoxyethyl adenosine
  modified_base 20: mod_base = OTHER; note = 2'-O-methoxyethyl guanosine
  misc_feature 1..5: note = RNA
  misc_feature 6..15: note = DNA
  misc_feature 16..20: note = RNA
cgcagtatggatcggcagag

SEQ ID NO: 570 - DNA, 20 bp, synthetic construct
  source 1..20: mol_type = other DNA
  modified_base 1: mod_base = OTHER; note = 2'-O-methoxyethyl 5-methylcytidine
  modified_base 2: mod_base = OTHER; note = 2'-O-methoxyethyl guanosine
  modified_base 3: mod_base = OTHER; note = 2'-O-methoxyethyl adenosine
  modified_base 4: mod_base = OTHER; note = 2'-O-methoxyethyl adenosine
  modified_base 5: mod_base = OTHER; note = 2'-O-methoxyethyl guanosine
  modified_base 8: mod_base = OTHER; note = 2'-deoxy 5-methylcytidine
  modified_base 10: mod_base = OTHER; note = 2'-deoxy 5-methylcytidine
  modified_base 12: mod_base = OTHER; note = 2'-deoxy 5-methylcytidine
  modified_base 16: mod_base = OTHER; note = 2'-O-methoxyethyl 5-methylcytidine
  modified_base 17: mod_base = OTHER; note = 2'-O-methoxyethyl 5-methylcytidine
  modified_base 18: mod_base = OTHER; note = 2'-O-methoxyethyl guanosine
  modified_base 19: mod_base = OTHER; note = 2'-O-methoxyethyl guanosine
  modified_base 20: mod_base = OTHER; note = 2'-O-methoxyethyl 5-methylcytidine
  misc_feature 1..5: note = RNA
  misc_feature 6..15: note = DNA
  misc_feature 16..20: note = RNA
cgaagtgcacacggtccggc

SEQ ID NO: 571 - DNA, 20 bp, synthetic construct
  source 1..20: mol_type = other DNA
  modified_base 1: mod_base = OTHER; note = 2'-O-methoxyethyl guanosine
  modified_base 2: mod_base = OTHER; note = 2'-O-methoxyethyl adenosine
  modified_base 3: mod_base = OTHER; note = 2'-O-methoxyethyl adenosine
  modified_base 4: mod_base = OTHER; note = 2'-O-methoxyethyl guanosine
  modified_base 5: mod_base = OTHER; note = 2'-O-methoxyethyl thymidine
  modified_base 7: mod_base = OTHER; note = 2'-deoxy 5-methylcytidine
  modified_base 9: mod_base = OTHER; note = 2'-deoxy 5-methylcytidine
  modified_base 11: mod_base = OTHER; note = 2'-deoxy 5-methylcytidine
  modified_base 15: mod_base = OTHER; note = 2'-deoxy 5-methylcytidine
  modified_base 16: mod_base = OTHER; note = 2'-O-methoxyethyl 5-methylcytidine
  modified_base 17: mod_base = OTHER; note = 2'-O-methoxyethyl guanosine
  modified_base 18: mod_base = OTHER; note = 2'-O-methoxyethyl guanosine
  modified_base 19: mod_base = OTHER; note = 2'-O-methoxyethyl 5-methylcytidine
  modified_base 20: mod_base = OTHER; note = 2'-O-methoxyethyl adenosine
  misc_feature 1..5: note = RNA
  misc_feature 6..15: note = DNA
  misc_feature 16..20: note = RNA
gaagtgcacacggtccggca

SEQ ID NO: 572 - DNA, 20 bp, synthetic construct
  source 1..20: mol_type = other DNA
  modified_base 1: mod_base = OTHER; note = 2'-O-methoxyethyl adenosine
  modified_base 2: mod_base = OTHER; note = 2'-O-methoxyethyl adenosine
  modified_base 3: mod_base = OTHER; note = 2'-O-methoxyethyl guanosine
  modified_base 4: mod_base = OTHER; note = 2'-O-methoxyethyl thymidine
  modified_base 5: mod_base = OTHER; note = 2'-O-methoxyethyl guanosine
  modified_base 6: mod_base = OTHER; note = 2'-deoxy 5-methylcytidine
  modified_base 8: mod_base = OTHER; note = 2'-deoxy 5-methylcytidine
  modified_base 10: mod_base = OTHER; note = 2'-deoxy 5-methylcytidine
  modified_base 14: mod_base = OTHER; note = 2'-deoxy 5-methylcytidine
  modified_base 15: mod_base = OTHER; note = 2'-deoxy 5-methylcytidine
  modified_base 16: mod_base = OTHER; note = 2'-O-methoxyethyl guanosine
  modified_base 17: mod_base = OTHER; note = 2'-O-methoxyethyl guanosine
  modified_base 18: mod_base = OTHER; note = 2'-O-methoxyethyl 5-methylcytidine
  modified_base 19: mod_base = OTHER; note = 2'-O-methoxyethyl adenosine
  modified_base 20: mod_base = OTHER; note = 2'-O-methoxyethyl guanosine
  misc_feature 1..5: note = RNA
  misc_feature 6..15: note = DNA
  misc_feature 16..20: note = RNA
aagtgcacacggtccggcag

SEQ ID NO: 573 - DNA, 20 bp, synthetic construct
  source 1..20: mol_type = other DNA
  modified_base 1: mod_base = OTHER; note = 2'-O-methoxyethyl guanosine
  modified_base 2: mod_base = OTHER; note = 2'-O-methoxyethyl thymidine
  modified_base 3: mod_base = OTHER; note = 2'-O-methoxyethyl guanosine
  modified_base 4: mod_base = OTHER; note = 2'-O-methoxyethyl 5-methylcytidine
  modified_base 5: mod_base = OTHER; note = 2'-O-methoxyethyl adenosine
  modified_base 6: mod_base = OTHER; note = 2'-deoxy 5-methylcytidine
  modified_base 8: mod_base = OTHER; note = 2'-deoxy 5-methylcytidine
  modified_base 12: mod_base = OTHER; note = 2'-deoxy 5-methylcytidine
  modified_base 13: mod_base = OTHER; note = 2'-deoxy 5-methylcytidine
  modified_base 16: mod_base = OTHER; note = 2'-O-methoxyethyl 5-methylcytidine
  modified_base 17: mod_base = OTHER; note = 2'-O-methoxyethyl adenosine
  modified_base 18: mod_base = OTHER; note = 2'-O-methoxyethyl guanosine
  modified_base 19: mod_base = OTHER; note = 2'-O-methoxyethyl adenosine
  modified_base 20: mod_base = OTHER; note = 2'-O-methoxyethyl thymidine
  misc_feature 1..5: note = RNA
  misc_feature 6..15: note = DNA
  misc_feature 16..20: note = RNA
gtgcacacggtccggcagat

SEQ ID NO: 574 - DNA, 20 bp, synthetic construct
  source 1..20: mol_type = other DNA
  modified_base 1: mod_base = OTHER; note = 2'-O-methoxyethyl guanosine
  modified_base 2: mod_base = OTHER; note = 2'-O-methoxyethyl 5-methylcytidine
  modified_base 3: mod_base = OTHER; note = 2'-O-methoxyethyl adenosine
  modified_base 4: mod_base = OTHER; note = 2'-O-methoxyethyl 5-methylcytidine
  modified_base 5: mod_base = OTHER; note = 2'-O-methoxyethyl adenosine
  modified_base 6: mod_base = OTHER; note = 2'-deoxy 5-methylcytidine
  modified_base 10: mod_base = OTHER; note = 2'-deoxy 5-methylcytidine
  modified_base 11: mod_base = OTHER; note = 2'-deoxy 5-methylcytidine
  modified_base 14: mod_base = OTHER; note = 2'-deoxy 5-methylcytidine
  modified_base 16: mod_base = OTHER; note = 2'-O-methoxyethyl guanosine
  modified_base 17: mod_base = OTHER; note = 2'-O-methoxyethyl adenosine
  modified_base 18: mod_base = OTHER; note = 2'-O-methoxyethyl thymidine
  modified_base 19: mod_base = OTHER; note = 2'-O-methoxyethyl guanosine
  modified_base 20: mod_base = OTHER; note = 2'-O-methoxyethyl adenosine
  misc_feature 1..5: note = RNA
  misc_feature 6..15: note = DNA
  misc_feature 16..20: note = RNA
gcacacggtccggcagatga

SEQ ID NO: 575 - DNA, 20 bp, synthetic construct
  source 1..20: mol_type = other DNA
  modified_base 1: mod_base = OTHER; note = 2'-O-methoxyethyl adenosine
  modified_base 2: mod_base = OTHER; note = 2'-O-methoxyethyl 5-methylcytidine
  modified_base 3: mod_base = OTHER; note = 2'-O-methoxyethyl adenosine
  modified_base 4: mod_base = OTHER; note = 2'-O-methoxyethyl 5-methylcytidine
  modified_base 5: mod_base = OTHER; note = 2'-O-methoxyethyl guanosine
  modified_base 8: mod_base = OTHER; note = 2'-deoxy 5-methylcytidine
  modified_base 9: mod_base = OTHER; note = 2'-deoxy 5-methylcytidine
  modified_base 12: mod_base = OTHER; note = 2'-deoxy 5-methylcytidine
  modified_base 16: mod_base = OTHER; note = 2'-O-methoxyethyl thymidine
  modified_base 17: mod_base = OTHER; note = 2'-O-methoxyethyl guanosine
  modified_base 18: mod_base = OTHER; note = 2'-O-methoxyethyl adenosine
  modified_base 19: mod_base = OTHER; note = 2'-O-methoxyethyl guanosine
  modified_base 20: mod_base = OTHER; note = 2'-O-methoxyethyl adenosine
  misc_feature 1..5: note = RNA
  misc_feature 6..15: note = DNA
  misc_feature 16..20: note = RNA
acacggtccggcagatgaga

SEQ ID NO: 576 - DNA, 20 bp, synthetic construct
  source 1..20: mol_type = other DNA
  modified_base 1: mod_base = OTHER; note = 2'-O-methoxyethyl adenosine
  modified_base 2: mod_base = OTHER; note = 2'-O-methoxyethyl 5-methylcytidine
  modified_base 3: mod_base = OTHER; note = 2'-O-methoxyethyl guanosine
  modified_base 4: mod_base = OTHER; note = 2'-O-methoxyethyl guanosine
  modified_base 5: mod_base = OTHER; note = 2'-O-methoxyethyl thymidine
  modified_base 6: mod_base = OTHER; note = 2'-deoxy 5-methylcytidine
  modified_base 7: mod_base = OTHER; note = 2'-deoxy 5-methylcytidine
  modified_base 10: mod_base = OTHER; note = 2'-deoxy 5-methylcytidine
  modified_base 16: mod_base = OTHER; note = 2'-O-methoxyethyl adenosine
  modified_base 17: mod_base = OTHER; note = 2'-O-methoxyethyl guanosine
  modified_base 18: mod_base = OTHER; note = 2'-O-methoxyethyl adenosine
  modified_base 19: mod_base = OTHER; note = 2'-O-methoxyethyl adenosine
  modified_base 20: mod_base = OTHER; note = 2'-O-methoxyethyl guanosine
  misc_feature 1..5: note = RNA
  misc_feature 6..15: note = DNA
  misc_feature 16..20: note = RNA
acggtccggcagatgagaag

SEQ ID NO: 577 - DNA, 20 bp, synthetic construct
  source 1..20: mol_type = other DNA
  modified_base 1: mod_base = OTHER; note = 2'-O-methoxyethyl guanosine
  modified_base 2: mod_base = OTHER; note = 2'-O-methoxyethyl guanosine
  modified_base 3: mod_base = OTHER; note = 2'-O-methoxyethyl thymidine
  modified_base 4: mod_base = OTHER; note = 2'-O-methoxyethyl 5-methylcytidine
  modified_base 5: mod_base = OTHER; note = 2'-O-methoxyethyl 5-methylcytidine
  modified_base 8: mod_base = OTHER; note = 2'-deoxy 5-methylcytidine
  modified_base 16: mod_base = OTHER; note = 2'-O-methoxyethyl adenosine
  modified_base 17: mod_base = OTHER; note = 2'-O-methoxyethyl adenosine
  modified_base 18: mod_base = OTHER; note = 2'-O-methoxyethyl guanosine
  modified_base 19: mod_base = OTHER; note = 2'-O-methoxyethyl guanosine
  modified_base 20: mod_base = OTHER; note = 2'-O-methoxyethyl 5-methylcytidine
  misc_feature 1..5: note = RNA
  misc_feature 6..15: note = DNA
  misc_feature 16..20: note = RNA
ggtccggcagatgagaaggc

SEQ ID NO: 578 - DNA, 20 bp, synthetic construct
  source 1..20: mol_type = other DNA
  modified_base 1: mod_base = OTHER; note = 2'-O-methoxyethyl thymidine
  modified_base 2: mod_base = OTHER; note = 2'-O-methoxyethyl 5-methylcytidine
  modified_base 3: mod_base = OTHER; note = 2'-O-methoxyethyl 5-methylcytidine
  modified_base 4: mod_base = OTHER; note = 2'-O-methoxyethyl guanosine
  modified_base 5: mod_base = OTHER; note = 2'-O-methoxyethyl guanosine
  modified_base 6: mod_base = OTHER; note = 2'-deoxy 5-methylcytidine
  modified_base 16: mod_base = OTHER; note = 2'-O-methoxyethyl guanosine
  modified_base 17: mod_base = OTHER; note = 2'-O-methoxyethyl guanosine
  modified_base 18: mod_base = OTHER; note = 2'-O-methoxyethyl 5-methylcytidine
  modified_base 19: mod_base = OTHER; note = 2'-O-methoxyethyl adenosine
  modified_base 20: mod_base = OTHER; note = 2'-O-methoxyethyl 5-methylcytidine
  misc_feature 1..5: note = RNA
  misc_feature 6..15: note = DNA
  misc_feature 16..20: note = RNA
tccggcagatgagaaggcac

SEQ ID NO: 579 - DNA, 20 bp, synthetic construct
  source 1..20: mol_type = other DNA
  modified_base 1: mod_base = OTHER; note = 2'-O-methoxyethyl 5-methylcytidine
  modified_base 2: mod_base = OTHER; note = 2'-O-methoxyethyl guanosine
  modified_base 3: mod_base = OTHER; note = 2'-O-methoxyethyl guanosine
  modified_base 4: mod_base = OTHER; note = 2'-O-methoxyethyl 5-methylcytidine
  modified_base 5: mod_base = OTHER; note = 2'-O-methoxyethyl adenosine
  modified_base 16: mod_base = OTHER; note = 2'-O-methoxyethyl 5-methylcytidine
  modified_base 17: mod_base = OTHER; note = 2'-O-methoxyethyl adenosine
  modified_base 18: mod_base = OTHER; note = 2'-O-methoxyethyl 5-methylcytidine
  modified_base 19: mod_base = OTHER; note = 2'-O-methoxyethyl adenosine
  modified_base 20: mod_base = OTHER; note = 2'-O-methoxyethyl guanosine
  misc_feature 1..5: note = RNA
  misc_feature 6..15: note = DNA
  misc_feature 16..20: note = RNA
cggcagatgagaaggcacag

SEQ ID NO: 580 - DNA, 20 bp, synthetic construct
  source 1..20: mol_type = other DNA
  modified_base 1: mod_base = OTHER; note = 2'-O-methoxyethyl guanosine
  modified_base 2: mod_base = OTHER; note = 2'-O-methoxyethyl 5-methylcytidine
  modified_base 3: mod_base = OTHER; note = 2'-O-methoxyethyl adenosine
  modified_base 4: mod_base = OTHER; note = 2'-O-methoxyethyl guanosine
  modified_base 5: mod_base = OTHER; note = 2'-O-methoxyethyl adenosine
  modified_base 14: mod_base = OTHER; note = 2'-deoxy 5-methylcytidine
  modified_base 16: mod_base = OTHER; note = 2'-O-methoxyethyl 5-methylcytidine
  modified_base 17: mod_base = OTHER; note = 2'-O-methoxyethyl adenosine
  modified_base 18: mod_base = OTHER; note = 2'-O-methoxyethyl guanosine
  modified_base 19: mod_base = OTHER; note = 2'-O-methoxyethyl adenosine
  modified_base 20: mod_base = OTHER; note = 2'-O-methoxyethyl 5-methylcytidine
  misc_feature 1..5: note = RNA
  misc_feature 6..15: note = DNA
  misc_feature 16..20: note = RNA
gcagatgagaaggcacagac

SEQ ID NO: 581 - DNA, 20 bp, synthetic construct
  source 1..20: mol_type = other DNA
  modified_base 1: mod_base = OTHER; note = 2'-O-methoxyethyl adenosine
  modified_base 2: mod_base = OTHER; note = 2'-O-methoxyethyl guanosine
  modified_base 3: mod_base = OTHER; note = 2'-O-methoxyethyl adenosine
  modified_base 4: mod_base = OTHER; note = 2'-O-methoxyethyl thymidine
  modified_base 5: mod_base = OTHER; note = 2'-O-methoxyethyl guanosine
  modified_base 12: mod_base = OTHER; note = 2'-deoxy 5-methylcytidine
  modified_base 14: mod_base = OTHER; note = 2'-deoxy 5-methylcytidine
  modified_base 16: mod_base = OTHER; note = 2'-O-methoxyethyl guanosine
  modified_base 17: mod_base = OTHER; note = 2'-O-methoxyethyl adenosine
  modified_base 18: mod_base = OTHER; note = 2'-O-methoxyethyl 5-methylcytidine
  modified_base 19: mod_base = OTHER; note = 2'-O-methoxyethyl guanosine
  modified_base 20: mod_base = OTHER; note = 2'-O-methoxyethyl guanosine
  misc_feature 1..5: note = RNA
  misc_feature 6..15: note = DNA
  misc_feature 16..20: note = RNA
agatgagaaggcacagacgg

SEQ ID NO: 582 - DNA, 20 bp, synthetic construct
  source 1..20: mol_type = other DNA
  modified_base 1: mod_base = OTHER; note = 2'-O-methoxyethyl adenosine
  modified_base 2: mod_base = OTHER; note = 2'-O-methoxyethyl thymidine
  modified_base 3: mod_base = OTHER; note = 2'-O-methoxyethyl guanosine
  modified_base 4: mod_base = OTHER; note = 2'-O-methoxyethyl adenosine
  modified_base 5: mod_base = OTHER; note = 2'-O-methoxyethyl guanosine
  modified_base 10: mod_base = OTHER; note = 2'-deoxy 5-methylcytidine
  modified_base 12: mod_base = OTHER; note = 2'-deoxy 5-methylcytidine
  modified_base 16: mod_base = OTHER; note = 2'-O-methoxyethyl 5-methylcytidine
  modified_base 17: mod_base = OTHER; note = 2'-O-methoxyethyl guanosine
  modified_base 18: mod_base = OTHER; note = 2'-O-methoxyethyl guanosine
  modified_base 19: mod_base = OTHER; note = 2'-O-methoxyethyl guanosine
  modified_base 20: mod_base = OTHER; note = 2'-O-methoxyethyl guanosine
  misc_feature 1..5: note = RNA
  misc_feature 6..15: note = DNA
  misc_feature 16..20: note = RNA
atgagaaggcacagacgggg

SEQ ID NO: 583 - DNA, 20 bp, synthetic construct
  source 1..20: mol_type = other DNA
  modified_base 1: mod_base = OTHER; note = 2'-O-methoxyethyl guanosine
  modified_base 2: mod_base = OTHER; note = 2'-O-methoxyethyl adenosine
  modified_base 3: mod_base = OTHER; note = 2'-O-methoxyethyl guanosine
  modified_base 4: mod_base = OTHER; note = 2'-O-methoxyethyl adenosine
  modified_base 5: mod_base = OTHER; note = 2'-O-methoxyethyl adenosine
  modified_base 8: mod_base = OTHER; note = 2'-deoxy 5-methylcytidine
  modified_base 10: mod_base = OTHER; note = 2'-deoxy 5-methylcytidine
  modified_base 14: mod_base = OTHER; note = 2'-deoxy 5-methylcytidine
  modified_base 16: mod_base = OTHER; note = 2'-O-methoxyethyl guanosine
  modified_base 17: mod_base = OTHER; note = 2'-O-methoxyethyl guanosine
  modified_base 18: mod_base = OTHER; note = 2'-O-methoxyethyl guanosine
  modified_base 19: mod_base = OTHER; note = 2'-O-methoxyethyl adenosine
  modified_base 20: mod_base = OTHER; note = 2'-O-methoxyethyl guanosine
  misc_feature 1..5: note = RNA
  misc_feature 6..15: note = DNA
  misc_feature 16..20: note = RNA
gagaaggcacagacggggag

SEQ ID NO: 584 - DNA, 20 bp, synthetic construct
  source 1..20: mol_type = other DNA
  modified_base 1: mod_base = OTHER; note = 2'-O-methoxyethyl guanosine
  modified_base 2: mod_base = OTHER; note = 2'-O-methoxyethyl adenosine
  modified_base 3: mod_base = OTHER; note = 2'-O-methoxyethyl adenosine
  modified_base 4: mod_base = OTHER; note = 2'-O-methoxyethyl guanosine
  modified_base 5: mod_base = OTHER; note = 2'-O-methoxyethyl guanosine
  modified_base 6: mod_base = OTHER; note = 2'-deoxy 5-methylcytidine
  modified_base 8: mod_base = OTHER; note = 2'-deoxy 5-methylcytidine
  modified_base 12: mod_base = OTHER; note = 2'-deoxy 5-methylcytidine
  modified_base 16: mod_base = OTHER; note = 2'-O-methoxyethyl guanosine
  modified_base 17: mod_base = OTHER; note = 2'-O-methoxyethyl adenosine
  modified_base 18: mod_base = OTHER; note = 2'-O-methoxyethyl guanosine
  modified_base 19: mod_base = OTHER; note = 2'-O-methoxyethyl thymidine
  modified_base 20: mod_base = OTHER; note = 2'-O-methoxyethyl 5-methylcytidine
  misc_feature 1..5: note = RNA
  misc_feature 6..15: note = DNA
  misc_feature 16..20: note = RNA
gaaggcacagacggggagtc

SEQ ID NO: 585 - DNA, 20 bp, synthetic construct
  source 1..20: mol_type = other DNA
  modified_base 1: mod_base = OTHER; note = 2'-O-methoxyethyl adenosine
  modified_base 2: mod_base = OTHER; note = 2'-O-methoxyethyl guanosine
  modified_base 3: mod_base = OTHER; note = 2'-O-methoxyethyl guanosine
  modified_base 4: mod_base = OTHER; note = 2'-O-methoxyethyl 5-methylcytidine
  modified_base 5: mod_base = OTHER; note = 2'-O-methoxyethyl adenosine
  modified_base 6: mod_base = OTHER; note = 2'-deoxy 5-methylcytidine
  modified_base 10: mod_base = OTHER; note = 2'-deoxy 5-methylcytidine
  modified_base 16: mod_base = OTHER; note = 2'-O-methoxyethyl guanosine
  modified_base 17: mod_base = OTHER; note = 2'-O-methoxyethyl thymidine
  modified_base 18: mod_base = OTHER; note = 2'-O-methoxyethyl 5-methylcytidine
  modified_base 19: mod_base = OTHER; note = 2'-O-methoxyethyl 5-methylcytidine
  modified_base 20: mod_base = OTHER; note = 2'-O-methoxyethyl guanosine
  misc_feature 1..5: note = RNA
  misc_feature 6..15: note = DNA
  misc_feature 16..20: note = RNA
aggcacagacggggagtccg

SEQ ID NO: 586 - DNA, 20 bp, synthetic construct
  source 1..20: mol_type = other DNA
  modified_base 1: mod_base = OTHER; note = 2'-O-methoxyethyl guanosine
  modified_base 2: mod_base = OTHER; note = 2'-O-methoxyethyl 5-methylcytidine
  modified_base 3: mod_base = OTHER; note = 2'-O-methoxyethyl adenosine
  modified_base 4: mod_base = OTHER; note = 2'-O-methoxyethyl 5-methylcytidine
  modified_base 5: mod_base = OTHER; note = 2'-O-methoxyethyl adenosine
  modified_base 8: mod_base = OTHER; note = 2'-deoxy 5-methylcytidine
  modified_base 16: mod_base = OTHER; note = 2'-O-methoxyethyl 5-methylcytidine
  modified_base 17: mod_base = OTHER; note = 2'-O-methoxyethyl 5-methylcytidine
  modified_base 18: mod_base = OTHER; note = 2'-O-methoxyethyl guanosine
  modified_base 19: mod_base = OTHER; note = 2'-O-methoxyethyl 5-methylcytidine
  modified_base 20: mod_base = OTHER; note = 2'-O-methoxyethyl guanosine
  misc_feature 1..5: note = RNA
  misc_feature 6..15: note = DNA
  misc_feature 16..20: note = RNA
gcacagacggggagtccgcg

SEQ ID NO: 587 - DNA, 20 bp, synthetic construct
  source 1..20: mol_type = other DNA
  modified_base 1: mod_base = OTHER; note = 2'-O-methoxyethyl adenosine
  modified_base 2: mod_base = OTHER; note = 2'-O-methoxyethyl 5-methylcytidine
  modified_base 3: mod_base = OTHER; note = 2'-O-methoxyethyl adenosine
  modified_base 4: mod_base = OTHER; note = 2'-O-methoxyethyl guanosine
  modified_base 5: mod_base = OTHER; note = 2'-O-methoxyethyl adenosine
  modified_base 6: mod_base = OTHER; note = 2'-deoxy 5-methylcytidine
  modified_base 14: mod_base = OTHER; note = 2'-deoxy 5-methylcytidine
  modified_base 15: mod_base = OTHER; note = 2'-deoxy 5-methylcytidine
  modified_base 16: mod_base = OTHER; note = 2'-O-methoxyethyl guanosine
  modified_base 17: mod_base = OTHER; note = 2'-O-methoxyethyl 5-methylcytidine
  modified_base 18: mod_base = OTHER; note = 2'-O-methoxyethyl guanosine
  modified_base 19: mod_base = OTHER; note = 2'-O-methoxyethyl thymidine
  modified_base 20: mod_base = OTHER; note = 2'-O-methoxyethyl adenosine
  misc_feature 1..5: note = RNA
  misc_feature 6..15: note = DNA
  misc_feature 16..20: note = RNA
acagacggggagtccgcgta

SEQ ID NO: 588 - DNA, 20 bp, synthetic construct
  source 1..20: mol_type = other DNA
  modified_base 1: mod_base = OTHER; note = 2'-O-methoxyethyl adenosine
  modified_base 2: mod_base = OTHER; note = 2'-O-methoxyethyl guanosine
  modified_base 3: mod_base = OTHER; note = 2'-O-methoxyethyl adenosine
  modified_base 4: mod_base = OTHER; note = 2'-O-methoxyethyl 5-methylcytidine
  modified_base 5: mod_base = OTHER; note = 2'-O-methoxyethyl guanosine
  modified_base 12: mod_base = OTHER; note = 2'-deoxy 5-methylcytidine
  modified_base 13: mod_base = OTHER; note = 2'-deoxy 5-methylcytidine
  modified_base 15: mod_base = OTHER; note = 2'-deoxy 5-methylcytidine
  modified_base 16: mod_base = OTHER; note = 2'-O-methoxyethyl guanosine
  modified_base 17: mod_base = OTHER; note = 2'-O-methoxyethyl thymidine
  modified_base 18: mod_base = OTHER; note = 2'-O-methoxyethyl adenosine
  modified_base 19: mod_base = OTHER; note = 2'-O-methoxyethyl adenosine
  modified_base 20: mod_base = OTHER; note = 2'-O-methoxyethyl adenosine
  misc_feature 1..5: note = RNA
  misc_feature 6..15: note = DNA
  misc_feature 16..20: note = RNA
agacggggagtccgcgtaaa

SEQ ID NO: 589 - DNA, 20 bp, synthetic construct
  source 1..20: mol_type = other DNA
  modified_base 1: mod_base = OTHER; note = 2'-O-methoxyethyl adenosine
  modified_base 2: mod_base = OTHER; note = 2'-O-methoxyethyl 5-methylcytidine
  modified_base 3: mod_base = OTHER; note = 2'-O-methoxyethyl guanosine
  modified_base 4: mod_base = OTHER; note = 2'-O-methoxyethyl guanosine
  modified_base 5: mod_base = OTHER; note = 2'-O-methoxyethyl guanosine
  modified_base 10: mod_base = OTHER; note = 2'-deoxy 5-methylcytidine
  modified_base 11: mod_base = OTHER; note = 2'-deoxy 5-methylcytidine
  modified_base 13: mod_base = OTHER; note = 2'-deoxy 5-methylcytidine
  modified_base 16: mod_base = OTHER; note = 2'-O-methoxyethyl adenosine
  modified_base 17: mod_base = OTHER; note = 2'-O-methoxyethyl adenosine
  modified_base 18: mod_base = OTHER; note = 2'-O-methoxyethyl adenosine
  modified_base 19: mod_base = OTHER; note = 2'-O-methoxyethyl guanosine
  modified_base 20: mod_base = OTHER; note = 2'-O-methoxyethyl adenosine
  misc_feature 1..5: note = RNA
  misc_feature 6..15: note = DNA
  misc_feature 16..20: note = RNA
acggggagtccgcgtaaaga

SEQ ID NO: 590 - DNA, 20 bp, synthetic construct
  source 1..20: mol_type = other DNA
  modified_base 1: mod_base = OTHER; note = 2'-O-methoxyethyl guanosine
  modified_base 2: mod_base = OTHER; note = 2'-O-methoxyethyl guanosine
  modified_base 3: mod_base = OTHER; note = 2'-O-methoxyethyl guanosine
  modified_base 4: mod_base = OTHER; note = 2'-O-methoxyethyl guanosine
  modified_base 5: mod_base = OTHER; note = 2'-O-methoxyethyl adenosine
  modified_base 8: mod_base = OTHER; note = 2'-deoxy 5-methylcytidine
  modified_base 9: mod_base = OTHER; note = 2'-deoxy 5-methylcytidine
  modified_base 11: mod_base = OTHER; note = 2'-deoxy 5-methylcytidine
  modified_base 16: mod_base = OTHER; note = 2'-O-methoxyethyl adenosine
  modified_base 17: mod_base = OTHER; note = 2'-O-methoxyethyl guanosine
  modified_base 18: mod_base = OTHER; note = 2'-O-methoxyethyl adenosine
  modified_base 19: mod_base = OTHER; note = 2'-O-methoxyethyl guanosine
  modified_base 20: mod_base = OTHER; note = 2'-O-methoxyethyl adenosine
  misc_feature 1..5: note = RNA
  misc_feature 6..15: note = DNA
  misc_feature 16..20: note = RNA
ggggagtccgcgtaaagaga

SEQ ID NO: 591 - DNA, 20 bp, synthetic construct
  source 1..20: mol_type = other DNA
  modified_base 1: mod_base = OTHER; note = 2'-O-methoxyethyl guanosine
  modified_base 2: mod_base = OTHER; note = 2'-O-methoxyethyl guanosine
  modified_base 3: mod_base = OTHER; note = 2'-O-methoxyethyl adenosine
  modified_base 4: mod_base = OTHER; note = 2'-O-methoxyethyl guanosine
  modified_base 5: mod_base = OTHER; note = 2'-O-methoxyethyl thymidine
  modified_base 6: mod_base = OTHER; note = 2'-deoxy 5-methylcytidine
  modified_base 7: mod_base = OTHER; note = 2'-deoxy 5-methylcytidine
  modified_base 9: mod_base = OTHER; note = 2'-deoxy 5-methylcytidine
  modified_base 16: mod_base = OTHER; note = 2'-O-methoxyethyl adenosine
  modified_base 17: mod_base = OTHER; note = 2'-O-methoxyethyl guanosine
  modified_base 18: mod_base = OTHER; note = 2'-O-methoxyethyl adenosine
  modified_base 19: mod_base = OTHER; note = 2'-O-methoxyethyl guanosine
  modified_base 20: mod_base = OTHER; note = 2'-O-methoxyethyl guanosine
  misc_feature 1..5: note = RNA
  misc_feature 6..15: note = DNA
  misc_feature 16..20: note = RNA
ggagtccgcgtaaagagagg

SEQ ID NO: 592 - DNA, 20 bp, synthetic construct
  source 1..20: mol_type = other DNA
  modified_base 1: mod_base = OTHER; note = 2'-O-methoxyethyl guanosine
  modified_base 2: mod_base = OTHER; note = 2'-O-methoxyethyl guanosine
  modified_base 3: mod_base = OTHER; note = 2'-O-methoxyethyl thymidine
  modified_base 4: mod_base = OTHER; note = 2'-O-methoxyethyl 5-methylcytidine
  modified_base 5: mod_base = OTHER; note = 2'-O-methoxyethyl guanosine
  modified_base 7: mod_base = OTHER; note = 2'-deoxy 5-methylcytidine
  modified_base 8: mod_base = OTHER; note = 2'-deoxy 5-methylcytidine
  modified_base 10: mod_base = OTHER; note = 2'-deoxy 5-methylcytidine
  modified_base 16: mod_base = OTHER; note = 2'-O-methoxyethyl thymidine
  modified_base 17: mod_base = OTHER; note = 2'-O-methoxyethyl 5-methylcytidine
  modified_base 18: mod_base = OTHER; note = 2'-O-methoxyethyl adenosine
  modified_base 19: mod_base = OTHER; note = 2'-O-methoxyethyl guanosine
  modified_base 20: mod_base = OTHER; note = 2'-O-methoxyethyl 5-methylcytidine
  misc_feature 1..5: note = RNA
  misc_feature 6..15: note = DNA
  misc_feature 16..20: note = RNA
ggtcgtccgcaggattcagc

SEQ ID NO: 593 - DNA, 20 bp, synthetic construct
  source 1..20: mol_type = other DNA
  modified_base 1: mod_base = OTHER; note = 2'-O-methoxyethyl guanosine
  modified_base 2: mod_base = OTHER; note = 2'-O-methoxyethyl thymidine
  modified_base 3: mod_base = OTHER; note = 2'-O-methoxyethyl 5-methylcytidine
  modified_base 4: mod_base = OTHER; note = 2'-O-methoxyethyl guanosine
  modified_base 5: mod_base = OTHER; note = 2'-O-methoxyethyl thymidine
  modified_base 6: mod_base = OTHER; note = 2'-deoxy 5-methylcytidine
  modified_base 7: mod_base = OTHER; note = 2'-deoxy 5-methylcytidine
  modified_base 9: mod_base = OTHER; note = 2'-deoxy 5-methylcytidine
  modified_base 16: mod_base = OTHER; note = 2'-O-methoxyethyl 5-methylcytidine
  modified_base 17: mod_base = OTHER; note = 2'-O-methoxyethyl adenosine
  modified_base 18: mod_base = OTHER; note = 2'-O-methoxyethyl guanosine
  modified_base 19: mod_base = OTHER; note = 2'-O-methoxyethyl 5-methylcytidine
  modified_base 20: mod_base = OTHER; note = 2'-O-methoxyethyl guanosine
  misc_feature 1..5: note = RNA
  misc_feature 6..15: note = DNA
  misc_feature 16..20: note = RNA
gtcgtccgcaggattcagcg

SEQ ID NO: 594 - DNA, 20 bp, synthetic construct
  source 1..20: mol_type = other DNA
  modified_base 1: mod_base = OTHER; note = 2'-O-methoxyethyl thymidine
  modified_base 2: mod_base = OTHER; note = 2'-O-methoxyethyl 5-methylcytidine
  modified_base 3: mod_base = OTHER; note = 2'-O-methoxyethyl guanosine
  modified_base 4: mod_base = OTHER; note = 2'-O-methoxyethyl thymidine
  modified_base 5: mod_base = OTHER; note = 2'-O-methoxyethyl 5-methylcytidine
  modified_base 6: mod_base = OTHER; note = 2'-deoxy 5-methylcytidine
  modified_base 8: mod_base = OTHER; note = 2'-deoxy 5-methylcytidine
  modified_base 15: mod_base = OTHER; note = 2'-deoxy 5-methylcytidine
  modified_base 16: mod_base = OTHER; note = 2'-O-methoxyethyl adenosine
  modified_base 17: mod_base = OTHER; note = 2'-O-methoxyethyl guanosine
  modified_base 18: mod_base = OTHER; note = 2'-O-methoxyethyl 5-methylcytidine
  modified_base 19: mod_base = OTHER; note = 2'-O-methoxyethyl guanosine
  modified_base 20: mod_base = OTHER; note = 2'-O-methoxyethyl 5-methylcytidine
  misc_feature 1..5: note = RNA
  misc_feature 6..15: note = DNA
  misc_feature 16..20: note = RNA
tcgtccgcaggattcagcgc

SEQ ID NO: 595 - DNA, 20 bp, synthetic construct
  source 1..20: mol_type = other DNA
  modified_base 1: mod_base = OTHER; note = 2'-O-methoxyethyl 5-methylcytidine
  modified_base 2: mod_base = OTHER; note = 2'-O-methoxyethyl guanosine
  modified_base 3: mod_base = OTHER; note = 2'-O-methoxyethyl thymidine
  modified_base 4: mod_base = OTHER; note = 2'-O-methoxyethyl 5-methylcytidine
  modified_base 5: mod_base = OTHER; note = 2'-O-methoxyethyl 5-methylcytidine
  modified_base 7: mod_base = OTHER; note = 2'-deoxy 5-methylcytidine
  modified_base 14: mod_base = OTHER; note = 2'-deoxy 5-methylcytidine
  modified_base 16: mod_base = OTHER; note = 2'-O-methoxyethyl guanosine
  modified_base 17: mod_base = OTHER; note = 2'-O-methoxyethyl 5-methylcytidine
  modified_base 18: mod_base = OTHER; note = 2'-O-methoxyethyl guanosine
  modified_base 19: mod_base = OTHER; note = 2'-O-methoxyethyl 5-methylcytidine
  modified_base 20: mod_base = OTHER; note = 2'-O-methoxyethyl 5-methylcytidine
  misc_feature 1..5: note = RNA
  misc_feature 6..15: note = DNA
  misc_feature 16..20: note = RNA
cgtccgcaggattcagcgcc

SEQ ID NO: 596 - DNA, 20 bp, synthetic construct
  source 1..20: mol_type = other DNA
  modified_base 1: mod_base = OTHER; note = 2'-O-methoxyethyl guanosine
  modified_base 2: mod_base = OTHER; note = 2'-O-methoxyethyl thymidine
  modified_base 3: mod_base = OTHER; note = 2'-O-methoxyethyl 5-methylcytidine
  modified_base 4: mod_base = OTHER; note = 2'-O-methoxyethyl 5-methylcytidine
  modified_base 5: mod_base = OTHER; note = 2'-O-methoxyethyl guanosine
  modified_base 6: mod_base = OTHER; note = 2'-deoxy 5-methylcytidine
  modified_base 13: mod_base = OTHER; note = 2'-deoxy 5-methylcytidine
  modified_base 16: mod_base = OTHER; note = 2'-O-methoxyethyl 5-methylcytidine
  modified_base 17: mod_base = OTHER; note = 2'-O-methoxyethyl guanosine
  modified_base 18: mod_base = OTHER; note = 2'-O-methoxyethyl 5-methylcytidine
  modified_base 19: mod_base = OTHER; note = 2'-O-methoxyethyl 5-methylcytidine
  modified_base 20: mod_base = OTHER; note = 2'-O-methoxyethyl guanosine
  misc_feature 1..5: note = RNA
  misc_feature 6..15: note = DNA
  misc_feature 16..20: note = RNA
gtccgcaggattcagcgccg

SEQ ID NO: 597 - DNA, 20 bp, synthetic construct
  source 1..20: mol_type = other DNA
  modified_base 1: mod_base = OTHER; note = 2'-O-methoxyethyl thymidine
  modified_base 2: mod_base = OTHER; note = 2'-O-methoxyethyl 5-methylcytidine
  modified_base 3: mod_base = OTHER; note = 2'-O-methoxyethyl 5-methylcytidine
  modified_base 4: mod_base = OTHER; note = 2'-O-methoxyethyl guanosine
  modified_base 5: mod_base = OTHER; note = 2'-O-methoxyethyl 5-methylcytidine
  modified_base 12: mod_base = OTHER; note = 2'-deoxy 5-methylcytidine
  modified_base 15: mod_base = OTHER; note = 2'-deoxy 5-methylcytidine
  modified_base 16: mod_base = OTHER; note = 2'-O-methoxyethyl guanosine
  modified_base 17: mod_base = OTHER; note = 2'-O-methoxyethyl 5-methylcytidine
  modified_base 18: mod_base = OTHER; note = 2'-O-methoxyethyl 5-methylcytidine
  modified_base 19: mod_base = OTHER; note = 2'-O-methoxyethyl guanosine
  modified_base 20: mod_base = OTHER; note = 2'-O-methoxyethyl adenosine
  misc_feature 1..5: note = RNA
  misc_feature 6..15: note = DNA
  misc_feature 16..20: note = RNA
tccgcaggattcagcgccga

SEQ ID NO: 598 - DNA, 20 bp, synthetic construct
  source 1..20: mol_type = other DNA
  modified_base 1: mod_base = OTHER; note = 2'-O-methoxyethyl 5-methylcytidine
  modified_base 2: mod_base = OTHER; note = 2'-O-methoxyethyl 5-methylcytidine
  modified_base 3: mod_base = OTHER; note = 2'-O-methoxyethyl guanosine
  modified_base 4: mod_base = OTHER; note = 2'-O-methoxyethyl 5-methylcytidine
  modified_base 5: mod_base = OTHER; note = 2'-O-methoxyethyl adenosine
  modified_base 11: mod_base = OTHER; note = 2'-deoxy 5-methylcytidine
  modified_base 14: mod_base = OTHER; note = 2'-deoxy 5-methylcytidine
  modified_base 16: mod_base = OTHER; note = 2'-O-methoxyethyl 5-methylcytidine
  modified_base 17: mod_base = OTHER; note = 2'-O-methoxyethyl 5-methylcytidine
  modified_base 18: mod_base = OTHER; note = 2'-O-methoxyethyl guanosine
  modified_base 19: mod_base = OTHER; note = 2'-O-methoxyethyl adenosine
  modified_base 20: mod_base = OTHER; note = 2'-O-methoxyethyl 5-methylcytidine
  misc_feature 1..5: note = RNA
  misc_feature 6..15: note = DNA
  misc_feature 16..20: note = RNA
ccgcaggattcagcgccgac

SEQ ID NO: 599 - DNA, 20 bp, synthetic construct
  source 1..20: mol_type = other DNA
  modified_base 1: mod_base = OTHER; note = 2'-O-methoxyethyl 5-methylcytidine
  modified_base 2: mod_base = OTHER; note = 2'-O-methoxyethyl guanosine
  modified_base 3: mod_base = OTHER; note = 2'-O-methoxyethyl 5-methylcytidine
  modified_base 4: mod_base = OTHER; note = 2'-O-methoxyethyl adenosine
  modified_base 5: mod_base = OTHER; note = 2'-O-methoxyethyl guanosine
  modified_base 10: mod_base = OTHER; note = 2'-deoxy 5-methylcytidine
  modified_base 13: mod_base = OTHER; note = 2'-deoxy 5-methylcytidine
  modified_base 15: mod_base = OTHER; note = 2'-deoxy 5-methylcytidine
  modified_base 16: mod_base = OTHER; note = 2'-O-methoxyethyl 5-methylcytidine
  modified_base 17: mod_base = OTHER; note = 2'-O-methoxyethyl guanosine
  modified_base 18: mod_base = OTHER; note = 2'-O-methoxyethyl adenosine
  modified_base 19: mod_base = OTHER; note = 2'-O-methoxyethyl 5-methylcytidine
  modified_base 20: mod_base = OTHER; note = 2'-O-methoxyethyl guanosine
  misc_feature 1..5: note = RNA
  misc_feature 6..15: note = DNA
  misc_feature 16..20: note = RNA
cgcaggattcagcgccgacg

SEQ ID NO: 600 - DNA, 20 bp, synthetic construct
  source 1..20: mol_type = other DNA
  modified_base 1: mod_base = OTHER; note = 2'-O-methoxyethyl guanosine
  modified_base 2: mod_base = OTHER; note = 2'-O-methoxyethyl 5-methylcytidine
  modified_base 3: mod_base = OTHER; note = 2'-O-methoxyethyl adenosine
  modified_base 4: mod_base = OTHER; note = 2'-O-methoxyethyl guanosine
  modified_base 5: mod_base = OTHER; note = 2'-O-methoxyethyl guanosine
  modified_base 9: mod_base = OTHER; note = 2'-deoxy 5-methylcytidine
  modified_base 12: mod_base = OTHER; note = 2'-deoxy 5-methylcytidine
  modified_base 14: mod_base = OTHER; note = 2'-deoxy 5-methylcytidine
  modified_base 15: mod_base = OTHER; note = 2'-deoxy 5-methylcytidine
  modified_base 16: mod_base = OTHER; note = 2'-O-methoxyethyl guanosine
  modified_base 17: mod_base = OTHER; note = 2'-O-methoxyethyl adenosine
  modified_base 18: mod_base = OTHER; note = 2'-O-methoxyethyl 5-methylcytidine
  modified_base 19: mod_base = OTHER; note = 2'-O-methoxyethyl guanosine
  modified_base 20: mod_base = OTHER; note = 2'-O-methoxyethyl guanosine
  misc_feature 1..5: note = RNA
  misc_feature 6..15: note = DNA
  misc_feature 16..20: note = RNA
gcaggattcagcgccgacgg

SEQ ID NO: 601 - DNA, 20 bp, synthetic construct
  source 1..20: mol_type = other DNA
  modified_base 1: mod_base = OTHER; note = 2'-O-methoxyethyl 5-methylcytidine
  modified_base 2: mod_base = OTHER; note = 2'-O-methoxyethyl adenosine
  modified_base 3: mod_base = OTHER; note = 2'-O-methoxyethyl guanosine
  modified_base 4: mod_base = OTHER; note = 2'-O-methoxyethyl guanosine
  modified_base 5: mod_base = OTHER; note = 2'-O-methoxyethyl adenosine
  modified_base 8: mod_base = OTHER; note = 2'-deoxy 5-methylcytidine
  modified_base 11: mod_base = OTHER; note = 2'-deoxy 5-methylcytidine
  modified_base 13: mod_base = OTHER; note = 2'-deoxy 5-methylcytidine
  modified_base 14: mod_base = OTHER; note = 2'-deoxy 5-methylcytidine
  modified_base 16: mod_base = OTHER; note = 2'-O-methoxyethyl adenosine
  modified_base 17: mod_base = OTHER; note = 2'-O-methoxyethyl 5-methylcytidine
  modified_base 18: mod_base = OTHER; note = 2'-O-methoxyethyl guanosine
  modified_base 19: mod_base = OTHER; note = 2'-O-methoxyethyl guanosine
  modified_base 20: mod_base = OTHER; note = 2'-O-methoxyethyl guanosine
  misc_feature 1..5: note = RNA
  misc_feature 6..15: note = DNA
  misc_feature 16..20: note = RNA
caggattcagcgccgacggg

SEQ ID NO: 602 - DNA, 20 bp, synthetic construct
  source 1..20: mol_type = other DNA
  modified_base 1: mod_base = OTHER; note = 2'-O-methoxyethyl adenosine
  modified_base 2: mod_base = OTHER; note = 2'-O-methoxyethyl guanosine
  modified_base 3: mod_base = OTHER; note = 2'-O-methoxyethyl guanosine
  modified_base 4: mod_base = OTHER; note = 2'-O-methoxyethyl adenosine
  modified_base 5: mod_base = OTHER; note = 2'-O-methoxyethyl thymidine
  modified_base 7: mod_base = OTHER; note = 2'-deoxy 5-methylcytidine
  modified_base 10: mod_base = OTHER; note = 2'-deoxy 5-methylcytidine
  modified_base 12: mod_base = OTHER; note = 2'-deoxy 5-methylcytidine
  modified_base 13: mod_base = OTHER; note = 2'-deoxy 5-methylcytidine
  modified_base 16: mod_base = OTHER; note = 2'-O-methoxyethyl 5-methylcytidine
  modified_base 17: mod_base = OTHER; note = 2'-O-methoxyethyl guanosine
  modified_base 18: mod_base = OTHER; note = 2'-O-methoxyethyl guanosine
  modified_base 19: mod_base = OTHER; note = 2'-O-methoxyethyl guanosine
  modified_base 20: mod_base = OTHER; note = 2'-O-methoxyethyl adenosine
  misc_feature 1..5: note = RNA
  misc_feature 6..15: note = DNA
  misc_feature 16..20: note = RNA
aggattcagcgccgacggga

SEQ ID NO: 603 - DNA, 20 bp, synthetic construct
  source 1..20: mol_type = other DNA
  modified_base 1: mod_base = OTHER; note = 2'-O-methoxyethyl guanosine
  modified_base 2: mod_base = OTHER; note = 2'-O-methoxyethyl adenosine
  modified_base 3: mod_base = OTHER; note = 2'-O-methoxyethyl thymidine
  modified_base 4: mod_base = OTHER; note = 2'-O-methoxyethyl thymidine
  modified_base 5: mod_base = OTHER; note = 2'-O-methoxyethyl 5-methylcytidine
  modified_base 8: mod_base = OTHER; note = 2'-deoxy 5-methylcytidine
  modified_base 10: mod_base = OTHER; note = 2'-deoxy 5-methylcytidine
  modified_base 11: mod_base = OTHER; note = 2'-deoxy 5-methylcytidine
  modified_base 14: mod_base = OTHER; note = 2'-deoxy 5-methylcytidine
  modified_base 16: mod_base = OTHER; note = 2'-O-methoxyethyl guanosine
  modified_base 17: mod_base = OTHER; note = 2'-O-methoxyethyl guanosine
  modified_base 18: mod_base = OTHER; note = 2'-O-methoxyethyl adenosine
  modified_base 19: mod_base = OTHER; note = 2'-O-methoxyethyl 5-methylcytidine
  modified_base 20: mod_base = OTHER; note = 2'-O-methoxyethyl guanosine
  misc_feature 1..5: note = RNA
  misc_feature 6..15: note = DNA
  misc_feature 16..20: note = RNA
gattcagcgccgacgggacg

SEQ ID NO: 604 - DNA, 20 bp, synthetic construct
  source 1..20: mol_type = other DNA
  modified_base 1: mod_base = OTHER; note = 2'-O-methoxyethyl adenosine
  modified_base 2: mod_base = OTHER; note = 2'-O-methoxyethyl thymidine
  modified_base 3: mod_base = OTHER; note = 2'-O-methoxyethyl thymidine
  modified_base 4: mod_base = OTHER; note = 2'-O-methoxyethyl 5-methylcytidine
  modified_base 5: mod_base = OTHER; note = 2'-O-methoxyethyl adenosine
  modified_base 7: mod_base = OTHER; note = 2'-deoxy 5-methylcytidine
  modified_base 9: mod_base = OTHER; note = 2'-deoxy 5-methylcytidine
  modified_base 10: mod_base = OTHER; note = 2'-deoxy 5-methylcytidine
  modified_base 13: mod_base = OTHER; note = 2'-deoxy 5-methylcytidine
  modified_base 16: mod_base = OTHER; note = 2'-O-methoxyethyl guanosine
  modified_base 17: mod_base = OTHER; note = 2'-O-methoxyethyl adenosine
  modified_base 18: mod_base = OTHER; note = 2'-O-methoxyethyl 5-methylcytidine
  modified_base 19: mod_base = OTHER; note = 2'-O-methoxyethyl guanosine
  modified_base 20: mod_base = OTHER; note = 2'-O-methoxyethyl thymidine
  misc_feature 1..5: note = RNA
  misc_feature 6..15: note = DNA
  misc_feature 16..20: note = RNA
attcagcgccgacgggacgt

SEQ ID NO: 605 - DNA, 20 bp, synthetic construct
  source 1..20: mol_type = other DNA
  modified_base 1: mod_base = OTHER; note = 2'-O-methoxyethyl thymidine
  modified_base 2: mod_base = OTHER; note = 2'-O-methoxyethyl thymidine
  modified_base 3: mod_base = OTHER; note = 2'-O-methoxyethyl 5-methylcytidine
  modified_base 4: mod_base = OTHER; note = 2'-O-methoxyethyl adenosine
  modified_base 5: mod_base = OTHER; note = 2'-O-methoxyethyl guanosine
  modified_base 6: mod_base = OTHER; note = 2'-deoxy 5-methylcytidine
  modified_base 8: mod_base = OTHER; note = 2'-deoxy 5-methylcytidine
  modified_base 9: mod_base = OTHER; note = 2'-deoxy 5-methylcytidine
  modified_base 12: mod_base = OTHER; note = 2'-deoxy 5-methylcytidine
  modified_base 16: mod_base = OTHER; note = 2'-O-methoxyethyl adenosine
  modified_base 17: mod_base = OTHER; note = 2'-O-methoxyethyl 5-methylcytidine
  modified_base 18: mod_base = OTHER; note = 2'-O-methoxyethyl guanosine
  modified_base 19: mod_base = OTHER; note = 2'-O-methoxyethyl thymidine
  modified_base 20: mod_base = OTHER; note = 2'-O-methoxyethyl adenosine
  misc_feature 1..5: note = RNA
  misc_feature 6..15: note = DNA
  misc_feature 16..20: note = RNA
ttcagcgccgacgggacgta

SEQ ID NO: 606 - DNA, 20 bp, synthetic construct
  source 1..20: mol_type = other DNA
  modified_base 1: mod_base = OTHER; note = 2'-O-methoxyethyl thymidine
  modified_base 2: mod_base = OTHER; note = 2'-O-methoxyethyl 5-methylcytidine
  modified_base 3: mod_base = OTHER; note = 2'-O-methoxyethyl adenosine
  modified_base 4: mod_base = OTHER; note = 2'-O-methoxyethyl guanosine
  modified_base 5: mod_base = OTHER; note = 2'-O-methoxyethyl 5-methylcytidine
  modified_base 7: mod_base = OTHER; note = 2'-deoxy 5-methylcytidine
  modified_base 8: mod_base = OTHER; note = 2'-deoxy 5-methylcytidine
  modified_base 11: mod_base = OTHER; note = 2'-deoxy 5-methylcytidine
  modified_base 16: mod_base = OTHER; note = 2'-O-methoxyethyl 5-methylcytidine
  modified_base 17: mod_base = OTHER; note = 2'-O-methoxyethyl guanosine
  modified_base 18: mod_base = OTHER; note = 2'-O-methoxyethyl thymidine
  modified_base 19: mod_base = OTHER; note = 2'-O-methoxyethyl adenosine
  modified_base 20: mod_base = OTHER; note = 2'-O-methoxyethyl adenosine
  misc_feature 1..5: note = RNA
  misc_feature 6..15: note = DNA
  misc_feature 16..20: note = RNA
tcagcgccgacgggacgtaa

SEQ ID NO: 607 - DNA, 20 bp, synthetic construct
  source 1..20: mol_type = other DNA
  modified_base 1: mod_base = OTHER; note = 2'-O-methoxyethyl 5-methylcytidine
  modified_base 2: mod_base = OTHER; note = 2'-O-methoxyethyl adenosine
  modified_base 3: mod_base = OTHER; note = 2'-O-methoxyethyl guanosine
  modified_base 4: mod_base = OTHER; note = 2'-O-methoxyethyl 5-methylcytidine
  modified_base 5: mod_base = OTHER; note = 2'-O-methoxyethyl guanosine
  modified_base 6: mod_base = OTHER; note = 2'-deoxy 5-methylcytidine
  modified_base 7: mod_base = OTHER; note = 2'-deoxy 5-methylcytidine
  modified_base 10: mod_base = OTHER; note = 2'-deoxy 5-methylcytidine
  modified_base 15: mod_base = OTHER; note = 2'-deoxy 5-methylcytidine
  modified_base 16: mod_base = OTHER; note = 2'-O-methoxyethyl guanosine
  modified_base 17: mod_base = OTHER; note = 2'-O-methoxyethyl thymidine
  modified_base 18: mod_base = OTHER; note = 2'-O-methoxyethyl adenosine
  modified_base 19: mod_base = OTHER; note = 2'-O-methoxyethyl adenosine
  modified_base 20: mod_base = OTHER; note = 2'-O-methoxyethyl adenosine
  misc_feature 1..5: note = RNA
  misc_feature 6..15: note = DNA
  misc_feature 16..20: note = RNA
cagcgccgacgggacgtaaa

SEQ ID NO: 608 - DNA, 20 bp, synthetic construct
  source 1..20: mol_type = other DNA
  modified_base 1: mod_base = OTHER; note = 2'-O-methoxyethyl adenosine
  modified_base 2: mod_base = OTHER; note = 2'-O-methoxyethyl guanosine
  modified_base 3: mod_base = OTHER; note = 2'-O-methoxyethyl 5-methylcytidine
  modified_base 4: mod_base = OTHER; note = 2'-O-methoxyethyl guanosine
  modified_base 5: mod_base = OTHER; note = 2'-O-methoxyethyl 5-methylcytidine
  modified_base 6: mod_base = OTHER; note = 2'-deoxy 5-methylcytidine
  modified_base 9: mod_base = OTHER; note = 2'-deoxy 5-methylcytidine
  modified_base 14: mod_base = OTHER; note = 2'-deoxy 5-methylcytidine
  modified_base 16: mod_base = OTHER; note = 2'-O-methoxyethyl thymidine
  modified_base 17: mod_base = OTHER; note = 2'-O-methoxyethyl adenosine
  modified_base 18: mod_base = OTHER; note = 2'-O-methoxyethyl adenosine
  modified_base 19: mod_base = OTHER; note = 2'-O-methoxyethyl adenosine
  modified_base 20: mod_base = OTHER; note = 2'-O-methoxyethyl 5-methylcytidine
  misc_feature 1..5: note = RNA
  misc_feature 6..15: note = DNA
  misc_feature 16..20: note = RNA
agcgccgacgggacgtaaac

SEQ ID NO: 609 - DNA, 20 bp, synthetic construct
  source 1..20: mol_type = other DNA
  modified_base 1: mod_base = OTHER; note = 2'-O-methoxyethyl guanosine
  modified_base 2: mod_base = OTHER; note = 2'-O-methoxyethyl 5-methylcytidine
  modified_base 3: mod_base = OTHER; note = 2'-O-methoxyethyl guanosine
  modified_base 4: mod_base = OTHER; note = 2'-O-methoxyethyl 5-methylcytidine
  modified_base 5: mod_base = OTHER; note = 2'-O-methoxyethyl 5-methylcytidine
  modified_base 8: mod_base = OTHER; note = 2'-deoxy 5-methylcytidine
  modified_base 13: mod_base = OTHER; note = 2'-deoxy 5-methylcytidine
  modified_base 16: mod_base = OTHER; note = 2'-O-methoxyethyl adenosine
  modified_base 17: mod_base = OTHER; note = 2'-O-methoxyethyl adenosine
  modified_base 18: mod_base = OTHER; note = 2'-O-methoxyethyl adenosine
  modified_base 19: mod_base = OTHER; note = 2'-O-methoxyethyl 5-methylcytidine
  modified_base 20: mod_base = OTHER; note = 2'-O-methoxyethyl adenosine
  misc_feature 1..5: note = RNA
  misc_feature 6..15: note = DNA
  misc_feature 16..20: note = RNA
gcgccgacgggacgtaaaca

SEQ ID NO: 610 - DNA, 20 bp, synthetic construct
  source 1..20: mol_type = other DNA
  modified_base 1: mod_base = OTHER; note = 2'-O-methoxyethyl 5-methylcytidine
  modified_base 2: mod_base = OTHER; note = 2'-O-methoxyethyl guanosine
  modified_base 3: mod_base = OTHER; note = 2'-O-methoxyethyl 5-methylcytidine
  modified_base 4: mod_base = OTHER; note = 2'-O-methoxyethyl 5-methylcytidine
  modified_base 5: mod_base = OTHER; note = 2'-O-methoxyethyl guanosine
  modified_base 7: mod_base = OTHER; note = 2'-deoxy 5-methylcytidine
  modified_base 12: mod_base = OTHER; note = 2'-deoxy 5-methylcytidine
  modified_base 16: mod_base = OTHER; note = 2'-O-methoxyethyl adenosine
  modified_base 17: mod_base = OTHER; note = 2'-O-methoxyethyl adenosine
  modified_base 18: mod_base = OTHER; note = 2'-O-methoxyethyl 5-methylcytidine
  modified_base 19: mod_base = OTHER; note = 2'-O-methoxyethyl adenosine
  modified_base 20: mod_base = OTHER; note = 2'-O-methoxyethyl adenosine
  misc_feature 1..5: note = RNA
  misc_feature 6..15: note = DNA
  misc_feature 16..20: note = RNA
cgccgacgggacgtaaacaa

SEQ ID NO: 611 - DNA, 20 bp, synthetic construct
  source 1..20: mol_type = other DNA
  modified_base 1: mod_base = OTHER; note = 2'-O-methoxyethyl guanosine
  modified_base 2: mod_base = OTHER; note = 2'-O-methoxyethyl 5-methylcytidine
  modified_base 3: mod_base = OTHER; note = 2'-O-methoxyethyl 5-methylcytidine
  modified_base 4: mod_base = OTHER; note = 2'-O-methoxyethyl guanosine
  modified_base 5: mod_base = OTHER; note = 2'-O-methoxyethyl adenosine
  modified_base 6: mod_base = OTHER; note = 2'-deoxy 5-methylcytidine
  modified_base 11: mod_base = OTHER; note = 2'-deoxy 5-methylcytidine
  modified_base 16: mod_base = OTHER; note = 2'-O-methoxyethyl adenosine
  modified_base 17: mod_base = OTHER; note = 2'-O-methoxyethyl 5-methylcytidine
  modified_base 18: mod_base = OTHER; note = 2'-O-methoxyethyl adenosine
  modified_base 19: mod_base = OTHER; note = 2'-O-methoxyethyl adenosine
  modified_base 20: mod_base = OTHER; note = 2'-O-methoxyethyl adenosine
  misc_feature 1..5: note = RNA
  misc_feature 6..15: note = DNA
  misc_feature 16..20: note = RNA
gccgacgggacgtaaacaaa

SEQ ID NO: 612 - DNA, 20 bp, synthetic construct
  source 1..20: mol_type = other DNA
  modified_base 1: mod_base = OTHER; note = 2'-O-methoxyethyl 5-methylcytidine
  modified_base 2: mod_base = OTHER; note = 2'-O-methoxyethyl 5-methylcytidine
  modified_base 3: mod_base = OTHER; note = 2'-O-methoxyethyl guanosine
  modified_base 4: mod_base = OTHER; note = 2'-O-methoxyethyl adenosine
  modified_base 5: mod_base = OTHER; note = 2'-O-methoxyethyl 5-methylcytidine
  modified_base 10: mod_base = OTHER; note = 2'-deoxy 5-methylcytidine
  modified_base 16: mod_base = OTHER; note = 2'-O-methoxyethyl 5-methylcytidine
  modified_base 17: mod_base = OTHER; note = 2'-O-methoxyethyl adenosine
  modified_base 18: mod_base = OTHER; note = 2'-O-methoxyethyl adenosine
  modified_base 19: mod_base = OTHER; note = 2'-O-methoxyethyl adenosine
  modified_base 20: mod_base = OTHER; note = 2'-O-methoxyethyl guanosine
  misc_feature 1..5: note = RNA
  misc_feature 6..15: note = DNA
  misc_feature 16..20: note = RNA
ccgacgggacgtaaacaaag

SEQ ID NO: 613 - DNA, 20 bp, synthetic construct
  source 1..20: mol_type = other DNA
  modified_base 1: mod_base = OTHER; note = 2'-O-methoxyethyl 5-methylcytidine
  modified_base 2: mod_base = OTHER; note = 2'-O-methoxyethyl guanosine
  modified_base 3: mod_base = OTHER; note = 2'-O-methoxyethyl adenosine
  modified_base 4: mod_base = OTHER; note = 2'-O-methoxyethyl 5-methylcytidine
  modified_base 5: mod_base = OTHER; note = 2'-O-methoxyethyl guanosine
  modified_base 9: mod_base = OTHER; note = 2'-deoxy 5-methylcytidine
  modified_base 15: mod_base = OTHER; note = 2'-deoxy 5-methylcytidine
  modified_base 16: mod_base = OTHER; note = 2'-O-methoxyethyl adenosine
  modified_base 17: mod_base = OTHER; note = 2'-O-methoxyethyl adenosine
  modified_base 18: mod_base = OTHER; note = 2'-O-methoxyethyl adenosine
  modified_base 19: mod_base = OTHER; note = 2'-O-methoxyethyl guanosine
  modified_base 20: mod_base = OTHER; note = 2'-O-methoxyethyl guanosine
  misc_feature 1..5: note = RNA
  misc_feature 6..15: note = DNA
  misc_feature 16..20: note = RNA
cgacgggacgtaaacaaagg

SEQ ID NO: 614 - DNA, 40 bp, synthetic construct
  source 1..40: mol_type = other DNA
  modified_base 1: mod_base = OTHER; note = 2'-O-methoxyethyl guanosine
  modified_base 2: mod_base = OTHER; note = 2'-O-methoxyethyl 5-methylcytidine
  modified_base 3: mod_base = OTHER; note = 2'-O-methoxyethyl guanosine
  modified_base 4: mod_base = OTHER; note = 2'-O-methoxyethyl adenosine
  modified_base 5: mod_base = OTHER; note = 2'-O-methoxyethyl adenosine
  modified_base 9: mod_base = OTHER; note = 2'-deoxy 5-methylcytidine
  modified_base 11: mod_base = OTHER; note = 2'-deoxy 5-methylcytidine
  modified_base 13: mod_base = OTHER; note = 2'-deoxy 5-methylcytidine
  modified_base 16: mod_base = OTHER; note = 2'-O-methoxyethyl thymidine
  modified_base 17: mod_base = OTHER; note = 2'-O-methoxyethyl 5-methylcytidine
  modified_base 18: mod_base = OTHER; note = 2'-O-methoxyethyl 5-methylcytidine
  modified_base 19: mod_base = OTHER; note = 2'-O-methoxyethyl guanosine
  modified_base 20: mod_base = OTHER; note = 2'-O-methoxyethyl guanosine
  modified_base 21: mod_base = OTHER; note = 2'-O-methoxyethyl adenosine
  modified_base 22: mod_base = OTHER; note = 2'-O-methoxyethyl adenosine
  modified_base 23: mod_base = OTHER; note = 2'-O-methoxyethyl 5-methylcytidine
  modified_base 24: mod_base = OTHER; note = 2'-O-methoxyethyl adenosine
  modified_base 25: mod_base = OTHER; note = 2'-O-methoxyethyl 5-methylcytidine
  modified_base 26: mod_base = OTHER; note = 2'-O-methoxyethyl adenosine
  modified_base 27: mod_base = OTHER; note = 2'-O-methoxyethyl adenosine
  modified_base 28: mod_base = OTHER; note = 2'-O-methoxyethyl 5-methylcytidine
  modified_base 29: mod_base = OTHER; note = 2'-O-methoxyethyl adenosine
  modified_base 30: mod_base = OTHER; note = 2'-O-methoxyethyl 5-methylcytidine
  modified_base 31: mod_base = OTHER; note = 2'-O-methoxyethyl adenosine
  modified_base 32: mod_base = OTHER; note = 2'-O-methoxyethyl adenosine
  modified_base 33: mod_base = OTHER; note = 2'-O-methoxyethyl 5-methylcytidine
  modified_base 34: mod_base = OTHER; note = 2'-O-methoxyethyl adenosine
  modified_base 35: mod_base = OTHER; note = 2'-O-methoxyethyl 5-methylcytidine
  modified_base 36: mod_base = OTHER; note = 2'-O-methoxyethyl adenosine
  modified_base 37: mod_base = OTHER; note = 2'-O-methoxyethyl adenosine
  modified_base 38: mod_base = OTHER; note = 2'-O-methoxyethyl 5-methylcytidine
  modified_base 39: mod_base = OTHER; note = 2'-O-methoxyethyl adenosine
  modified_base 40: mod_base = OTHER; note = 2'-O-methoxyethyl 5-methylcytidine
  misc_feature 1..5: note = RNA
  misc_feature 6..15: note = DNA
  misc_feature 16..40: note = RNA
gcgaagtgcacacggtccggaacacaacacaacacaacac

SEQ ID NO: 615 - DNA, 40 bp, synthetic construct
  source 1..40: mol_type = other DNA
  modified_base 1: mod_base = OTHER; note = 2'-O-methoxyethyl adenosine
  modified_base 2: mod_base = OTHER; note = 2'-O-methoxyethyl adenosine
  modified_base 3: mod_base = OTHER; note = 2'-O-methoxyethyl 5-methylcytidine
  modified_base 4: mod_base = OTHER; note = 2'-O-methoxyethyl adenosine
  modified_base 5: mod_base = OTHER; note = 2'-O-methoxyethyl 5-methylcytidine
  modified_base 6: mod_base = OTHER; note = 2'-O-methoxyethyl adenosine
  modified_base 7: mod_base = OTHER; note = 2'-O-methoxyethyl adenosine
  modified_base 8: mod_base = OTHER; note = 2'-O-methoxyethyl 5-methylcytidine
  modified_base 9: mod_base = OTHER; note = 2'-O-methoxyethyl adenosine
  modified_base 10: mod_base = OTHER; note = 2'-O-methoxyethyl 5-methylcytidine
  modified_base 11: mod_base = OTHER; note = 2'-O-methoxyethyl guanosine
  modified_base 12: mod_base = OTHER; note = 2'-O-methoxyethyl 5-methylcytidine
  modified_base 13: mod_base = OTHER; note = 2'-O-methoxyethyl guanosine
  modified_base 14: mod_base = OTHER; note = 2'-O-methoxyethyl adenosine
  modified_base 15: mod_base = OTHER; note = 2'-O-methoxyethyl adenosine
  modified_base 19: mod_base = OTHER; note = 2'-deoxy 5-methylcytidine
  modified_base 21: mod_base = OTHER; note = 2'-deoxy 5-methylcytidine
  modified_base 23: mod_base = OTHER; note = 2'-deoxy 5-methylcytidine
  modified_base 26: mod_base = OTHER; note = 2'-O-methoxyethyl thymidine
  modified_base 27: mod_base = OTHER; note = 2'-O-methoxyethyl 5-methylcytidine
  modified_base 28: mod_base = OTHER; note = 2'-O-methoxyethyl 5-methylcytidine
  modified_base 29: mod_base = OTHER; note = 2'-O-methoxyethyl guanosine
  modified_base 30: mod_base = OTHER; note = 2'-O-methoxyethyl guanosine
  modified_base 31: mod_base = OTHER; note = 2'-O-methoxyethyl adenosine
  modified_base 32: mod_base = OTHER; note = 2'-O-methoxyethyl adenosine
  modified_base 33: mod_base = OTHER; note = 2'-O-methoxyethyl 5-methylcytidine
  modified_base 34: mod_base = OTHER; note = 2'-O-methoxyethyl adenosine
  modified_base 35: mod_base = OTHER; note = 2'-O-methoxyethyl 5-methylcytidine
  modified_base 36: mod_base = OTHER; note = 2'-O-methoxyethyl adenosine
  modified_base 37: mod_base = OTHER; note = 2'-O-methoxyethyl adenosine
  modified_base 38: mod_base = OTHER; note = 2'-O-methoxyethyl 5-methylcytidine
  modified_base 39: mod_base = OTHER; note = 2'-O-methoxyethyl adenosine
  modified_base 40: mod_base = OTHER; note = 2'-O-methoxyethyl 5-methylcytidine
  misc_feature 1..15: note = RNA
  misc_feature 16..25: note = DNA
  misc_feature 26..40: note = RNA
aacacaacacgcgaagtgcacacggtccggaacacaacac

SEQ ID NO: 616 - DNA, 40 bp, synthetic construct
  source 1..40: mol_type = other DNA
  modified_base 1: mod_base = OTHER; note = 2'-O-methoxyethyl adenosine
  modified_base 2: mod_base = OTHER; note = 2'-O-methoxyethyl adenosine
  modified_base 3: mod_base = OTHER; note = 2'-O-methoxyethyl 5-methylcytidine
  modified_base 4: mod_base = OTHER; note = 2'-O-methoxyethyl adenosine
  modified_base 5: mod_base = OTHER; note = 2'-O-methoxyethyl 5-methylcytidine
  modified_base 6: mod_base = OTHER; note = 2'-O-methoxyethyl adenosine
  modified_base 7: mod_base = OTHER; note = 2'-O-methoxyethyl adenosine
  modified_base 8: mod_base = OTHER; note = 2'-O-methoxyethyl 5-methylcytidine
  modified_base 9: mod_base = OTHER; note = 2'-O-methoxyethyl adenosine
  modified_base 10: mod_base = OTHER; note = 2'-O-methoxyethyl 5-methylcytidine
  modified_base 11: mod_base = OTHER; note = 2'-O-methoxyethyl adenosine
  modified_base 12: mod_base = OTHER; note = 2'-O-methoxyethyl adenosine
  modified_base 13: mod_base = OTHER; note = 2'-O-methoxyethyl 5-methylcytidine
  modified_base 14: mod_base = OTHER; note = 2'-O-methoxyethyl adenosine
  modified_base 15: mod_base = OTHER; note = 2'-O-methoxyethyl 5-methylcytidine
  modified_base 16: mod_base = OTHER; note = 2'-O-methoxyethyl adenosine
  modified_base 17: mod_base = OTHER; note = 2'-O-methoxyethyl adenosine
  modified_base 18: mod_base = OTHER; note = 2'-O-methoxyethyl 5-methylcytidine
  modified_base 19: mod_base = OTHER; note = 2'-O-methoxyethyl adenosine
  modified_base 20: mod_base = OTHER; note = 2'-O-methoxyethyl 5-methylcytidine
  modified_base 21: mod_base = OTHER; note = 2'-O-methoxyethyl guanosine
  modified_base 22: mod_base = OTHER; note = 2'-O-methoxyethyl 5-methylcytidine
  modified_base 23: mod_base = OTHER; note = 2'-O-methoxyethyl guanosine
  modified_base 24: mod_base = OTHER; note = 2'-O-methoxyethyl adenosine
  modified_base 25: mod_base = OTHER; note = 2'-O-methoxyethyl adenosine
  modified_base 29: mod_base = OTHER; note = 2'-deoxy 5-methylcytidine
  modified_base 31: mod_base = OTHER; note = 2'-deoxy 5-methylcytidine
  modified_base 33: mod_base = OTHER; note = 2'-deoxy 5-methylcytidine
  modified_base 36: mod_base = OTHER; note = 2'-O-methoxyethyl thymidine
  modified_base 37: mod_base = OTHER; note = 2'-O-methoxyethyl 5-methylcytidine
  modified_base 38: mod_base = OTHER; note = 2'-O-methoxyethyl 5-methylcytidine
  modified_base 39: mod_base = OTHER; note = 2'-O-methoxyethyl guanosine
  modified_base 40: mod_base = OTHER; note = 2'-O-methoxyethyl guanosine
  misc_feature 1..25: note = RNA
  misc_feature 26..35: note = DNA
  misc_feature 36..40: note = RNA
aacacaacacaacacaacacgcgaagtgcacacggtccgg

SEQ ID NO: 617 - DNA, 40 bp, synthetic construct
  source 1..40: mol_type = other DNA
  modified_base 1: mod_base = OTHER; note = 2'-O-methoxyethyl 5-methylcytidine
  modified_base 2: mod_base = OTHER; note = 2'-O-methoxyethyl adenosine
  modified_base 3: mod_base = OTHER; note = 2'-O-methoxyethyl 5-methylcytidine
  modified_base 4: mod_base = OTHER; note = 2'-O-methoxyethyl thymidine
  modified_base 5: mod_base = OTHER; note = 2'-O-methoxyethyl adenosine
  modified_base 11: mod_base = OTHER; note = 2'-deoxy 5-methylcytidine
  modified_base 16: mod_base = OTHER; note = 2'-O-methoxyethyl 5-methylcytidine
  modified_base 17: mod_base = OTHER; note = 2'-O-methoxyethyl 5-methylcytidine
  modified_base 18: mod_base = OTHER; note = 2'-O-methoxyethyl adenosine
  modified_base 19: mod_base = OTHER; note = 2'-O-methoxyethyl guanosine
  modified_base 20: mod_base = OTHER; note = 2'-O-methoxyethyl guanosine
  modified_base 21: mod_base = OTHER; note = 2'-O-methoxyethyl adenosine
  modified_base 22: mod_base = OTHER; note = 2'-O-methoxyethyl adenosine
  modified_base 23: mod_base = OTHER; note = 2'-O-methoxyethyl 5-methylcytidine
  modified_base 24: mod_base = OTHER; note = 2'-O-methoxyethyl adenosine
  modified_base 25: mod_base = OTHER; note = 2'-O-methoxyethyl 5-methylcytidine
  modified_base 26: mod_base = OTHER; note = 2'-O-methoxyethyl adenosine
  modified_base 27: mod_base = OTHER; note = 2'-O-methoxyethyl adenosine
  modified_base 28: mod_base = OTHER; note = 2'-O-methoxyethyl 5-methylcytidine
  modified_base 29: mod_base = OTHER; note = 2'-O-methoxyethyl adenosine
  modified_base 30: mod_base = OTHER; note = 2'-O-methoxyethyl 5-methylcytidine
  modified_base 31: mod_base = OTHER; note = 2'-O-methoxyethyl adenosine
  modified_base 32: mod_base = OTHER; note = 2'-O-methoxyethyl adenosine
  modified_base 33: mod_base = OTHER; note = 2'-O-methoxyethyl 5-methylcytidine
  modified_base 34: mod_base = OTHER; note = 2'-O-methoxyethyl adenosine
  modified_base 35: mod_base = OTHER; note = 2'-O-methoxyethyl 5-methylcytidine
  modified_base 36: mod_base = OTHER; note = 2'-O-methoxyethyl adenosine
  modified_base 37: mod_base = OTHER; note = 2'-O-methoxyethyl adenosine
  modified_base 38: mod_base = OTHER; note = 2'-O-methoxyethyl 5-methylcytidine
  modified_base 39: mod_base = OTHER; note = 2'-O-methoxyethyl adenosine
  modified_base 40: mod_base = OTHER; note = 2'-O-methoxyethyl 5-methylcytidine
  misc_feature 1..5: note = RNA
  misc_feature 6..15: note = DNA
  misc_feature 16..40: note = RNA
cactagtaaactgagccaggaacacaacacaacacaacac

SEQ ID NO: 618 - DNA, 40 bp, synthetic construct
  source 1..40: mol_type = other DNA
  modified_base 1: mod_base = OTHER; note = 2'-O-methoxyethyl thymidine
  modified_base 2: mod_base = OTHER; note = 2'-O-methoxyethyl 5-methylcytidine
  modified_base 3: mod_base = OTHER; note = 2'-O-methoxyethyl 5-methylcytidine
  modified_base 4: mod_base = OTHER; note = 2'-O-methoxyethyl guanosine
  modified_base 5: mod_base = OTHER; note = 2'-O-methoxyethyl 5-methylcytidine
  modified_base 15: mod_base = OTHER; note = 2'-deoxy 5-methylcytidine
  modified_base 16: mod_base = OTHER; note = 2'-O-methoxyethyl guanosine
  modified_base 17: mod_base = OTHER; note = 2'-O-methoxyethyl guanosine
  modified_base 18: mod_base = OTHER; note = 2'-O-methoxyethyl 5-methylcytidine
  modified_base 19: mod_base = OTHER; note = 2'-O-methoxyethyl adenosine
  modified_base 20: mod_base = OTHER; note = 2'-O-methoxyethyl guanosine
  modified_base 21: mod_base = OTHER; note = 2'-O-methoxyethyl adenosine
  modified_base 22: mod_base = OTHER; note = 2'-O-methoxyethyl adenosine
  modified_base 23: mod_base = OTHER; note = 2'-O-methoxyethyl 5-methylcytidine
  modified_base 24: mod_base = OTHER; note = 2'-O-methoxyethyl adenosine
  modified_base 25: mod_base = OTHER; note = 2'-O-methoxyethyl 5-methylcytidine
  modified_base 26: mod_base = OTHER; note = 2'-O-methoxyethyl adenosine
  modified_base 27: mod_base = OTHER; note = 2'-O-methoxyethyl adenosine
  modified_base 28: mod_base = OTHER; note = 2'-O-methoxyethyl 5-methylcytidine
  modified_base 29: mod_base = OTHER; note = 2'-O-methoxyethyl adenosine
  modified_base 30: mod_base = OTHER; note = 2'-O-methoxyethyl 5-methylcytidine
  modified_base 31: mod_base = OTHER; note = 2'-O-methoxyethyl adenosine
  modified_base 32: mod_base = OTHER; note = 2'-O-methoxyethyl adenosine
  modified_base 33: mod_base = OTHER; note = 2'-O-methoxyethyl 5-methylcytidine
  modified_base 34: mod_base = OTHER; note = 2'-O-methoxyethyl adenosine
  modified_base 35: mod_base = OTHER; note = 2'-O-methoxyethyl 5-methylcytidine
  modified_base 36: mod_base = OTHER; note = 2'-O-methoxyethyl adenosine
  modified_base 37: mod_base = OTHER; note = 2'-O-methoxyethyl adenosine
  modified_base 38: mod_base = OTHER; note = 2'-O-methoxyethyl 5-methylcytidine
  modified_base 39: mod_base = OTHER; note = 2'-O-methoxyethyl adenosine
  modified_base 40: mod_base = OTHER; note = 2'-O-methoxyethyl 5-methylcytidine
  misc_feature 1..5: note = RNA
  misc_feature 6..15: note = DNA
  misc_feature 16..40: note = RNA
tccgcagtatggatcggcagaacacaacacaacacaacac

SEQ ID NO: 619 - DNA, 40 bp, synthetic construct
  source 1..40: mol_type = other DNA
  modified_base 1: mod_base = OTHER; note = 2'-O-methoxyethyl 5-methylcytidine
  modified_base 2: mod_base = OTHER; note = 2'-O-methoxyethyl thymidine
  modified_base 3: mod_base = OTHER; note = 2'-O-methoxyethyl guanosine
  modified_base 4: mod_base = OTHER; note = 2'-O-methoxyethyl 5-methylcytidine
  modified_base 5: mod_base = OTHER; note = 2'-O-methoxyethyl guanosine
  modified_base 16: mod_base = OTHER; note = 2'-O-methoxyethyl guanosine
  modified_base 17: mod_base = OTHER; note = 2'-O-methoxyethyl adenosine
  modified_base 18: mod_base = OTHER; note = 2'-O-methoxyethyl thymidine
  modified_base 19: mod_base = OTHER; note = 2'-O-methoxyethyl thymidine
  modified_base 20: mod_base = OTHER; note = 2'-O-methoxyethyl 5-methylcytidine
  modified_base 21: mod_base = OTHER; note = 2'-O-methoxyethyl adenosine
  modified_base 22: mod_base = OTHER; note = 2'-O-methoxyethyl adenosine
  modified_base 23: mod_base = OTHER; note = 2'-O-methoxyethyl 5-methylcytidine
  modified_base 24: mod_base = OTHER; note = 2'-O-methoxyethyl adenosine
  modified_base 25: mod_base = OTHER; note = 2'-O-methoxyethyl 5-methylcytidine
  modified_base 26: mod_base = OTHER; note = 2'-O-methoxyethyl adenosine
  modified_base 27: mod_base = OTHER; note = 2'-O-methoxyethyl adenosine
  modified_base 28: mod_base = OTHER; note = 2'-O-methoxyethyl 5-methylcytidine
  modified_base 29: mod_base = OTHER; note = 2'-O-methoxyethyl adenosine
  modified_base 30: mod_base = OTHER; note = 2'-O-methoxyethyl 5-methylcytidine
  modified_base 31: mod_base = OTHER; note = 2'-O-methoxyethyl adenosine
  modified_base 32: mod_base = OTHER; note = 2'-O-methoxyethyl adenosine
  modified_base 33: mod_base = OTHER; note = 2'-O-methoxyethyl 5-methylcytidine
  modified_base 34: mod_base = OTHER; note = 2'-O-methoxyethyl adenosine
  modified_base 35: mod_base = OTHER; note = 2'-O-methoxyethyl 5-methylcytidine
  modified_base 36: mod_base = OTHER; note = 2'-O-methoxyethyl adenosine
  modified_base 37: mod_base = OTHER; note = 2'-O-methoxyethyl adenosine
  modified_base 38: mod_base = OTHER; note = 2'-O-methoxyethyl 5-methylcytidine
  modified_base 39: mod_base = OTHER; note = 2'-O-methoxyethyl adenosine
  modified_base 40: mod_base = OTHER; note = 2'-O-methoxyethyl 5-methylcytidine
  misc_feature 1..5: note = RNA
  misc_feature 6..15: note = DNA
  misc_feature 16..40: note = RNA
ctgcggtattgtgaggattcaacacaacacaacacaacac

SEQ ID NO: 620 - DNA, 40 bp, synthetic construct
  source 1..40: mol_type = other DNA
  modified_base 1: mod_base = OTHER; note = 2'-O-methoxyethyl guanosine
  modified_base 2: mod_base = OTHER; note = 2'-O-methoxyethyl 5-methylcytidine
  modified_base 3: mod_base = OTHER; note = 2'-O-methoxyethyl adenosine
  modified_base 4: mod_base = OTHER; note = 2'-O-methoxyethyl guanosine
  modified_base 5: mod_base = OTHER; note = 2'-O-methoxyethyl adenosine
  modified_base 13: mod_base = OTHER; note = 2'-deoxy 5-methylcytidine
  modified_base 16: mod_base = OTHER; note = 2'-O-methoxyethyl adenosine
  modified_base 17: mod_base = OTHER; note = 2'-O-methoxyethyl guanosine
  modified_base 18: mod_base = OTHER; note = 2'-O-methoxyethyl thymidine
  modified_base 19: mod_base = OTHER; note = 2'-O-methoxyethyl guanosine
  modified_base 20: mod_base = OTHER; note = 2'-O-methoxyethyl 5-methylcytidine
  modified_base 21: mod_base = OTHER; note = 2'-O-methoxyethyl adenosine
  modified_base 22: mod_base = OTHER; note = 2'-O-methoxyethyl adenosine
  modified_base 23: mod_base = OTHER; note = 2'-O-methoxyethyl 5-methylcytidine
  modified_base 24: mod_base = OTHER; note = 2'-O-methoxyethyl adenosine
  modified_base 25: mod_base = OTHER; note = 2'-O-methoxyethyl adenosine
  modified_base 26: mod_base = OTHER; note = 2'-O-methoxyethyl 5-methylcytidine
  modified_base 27: mod_base = OTHER; note = 2'-O-methoxyethyl adenosine
  modified_base 28: mod_base = OTHER; note = 2'-O-methoxyethyl adenosine
  modified_base 29: mod_base = OTHER; note = 2'-O-methoxyethyl 5-methylcytidine
  modified_base 30: mod_base = OTHER; note = 2'-O-methoxyethyl adenosine
  modified_base 31: mod_base = OTHER; note = 2'-O-methoxyethyl adenosine
  modified_base 32: mod_base = OTHER; note = 2'-O-methoxyethyl 5-methylcytidine
  modified_base 33: mod_base = OTHER; note = 2'-O-methoxyethyl adenosine
  modified_base 34: mod_base = OTHER; note = 2'-O-methoxyethyl adenosine
  modified_base 35: mod_base = OTHER; note = 2'-O-methoxyethyl 5-methylcytidine
  modified_base 36: mod_base = OTHER; note = 2'-O-methoxyethyl adenosine
  modified_base 37: mod_base = OTHER; note = 2'-O-methoxyethyl adenosine
  modified_base 38: mod_base = OTHER; note = 2'-O-methoxyethyl 5-methylcytidine
  modified_base 39: mod_base = OTHER; note = 2'-O-methoxyethyl adenosine
  modified_base 40: mod_base = OTHER; note = 2'-O-methoxyethyl adenosine
  misc_feature 1..5: note = RNA
  misc_feature 6..15: note = DNA
  misc_feature 16..40: note = RNA
gcagaggtgaagcgaagtgcaacaacaacaacaacaacaa

SEQ ID NO: 621 - DNA, 20 bp, synthetic construct
  source 1..20: mol_type = other DNA
  modified_base 1: mod_base = OTHER; note = 2'-O-methoxyethyl guanosine
  modified_base 2: mod_base = OTHER; note = 2'-O-methoxyethyl 5-methylcytidine
  modified_base 3: mod_base = OTHER; note = 2'-O-methoxyethyl guanosine
  modified_base 4: mod_base = OTHER; note = 2'-O-methoxyethyl adenosine
  modified_base 5: mod_base = OTHER; note = 2'-O-methoxyethyl adenosine
  modified_base 9: mod_base = OTHER; note = 2'-deoxy 5-methylcytidine
  modified_base 11: mod_base = OTHER; note = 2'-deoxy 5-methylcytidine
  modified_base 13: mod_base = OTHER; note = 2'-deoxy 5-methylcytidine
  modified_base 16: mod_base = OTHER; note = 2'-O-methoxyethyl adenosine
  modified_base 17: mod_base = OTHER; note = 2'-O-methoxyethyl 5-methylcytidine
  modified_base 18: mod_base = OTHER; note = 2'-O-methoxyethyl 5-methylcytidine
  modified_base 19: mod_base = OTHER; note = 2'-O-methoxyethyl guanosine
  modified_base 20: mod_base = OTHER; note = 2'-O-methoxyethyl guanosine
  misc_feature 1..5: note = RNA
  misc_feature 6..15: note = DNA
  misc_feature 16..20: note = RNA
gcgaagtgcacacggaccgg

SEQ ID NO: 622 - DNA, 20 bp, synthetic construct
  source 1..20: mol_type = other DNA
  modified_base 1: mod_base = OTHER; note = 2'-O-methoxyethyl 5-methylcytidine
  modified_base 2: mod_base = OTHER; note = 2'-O-methoxyethyl guanosine
  modified_base 3: mod_base = OTHER; note = 2'-O-methoxyethyl guanosine
  modified_base 4: mod_base = OTHER; note = 2'-O-methoxyethyl thymidine
  modified_base 5: mod_base = OTHER; note = 2'-O-methoxyethyl 5-methylcytidine
  modified_base 6: mod_base = OTHER; note = 2'-deoxy 5-methylcytidine
  modified_base 9: mod_base = OTHER; note = 2'-deoxy 5-methylcytidine
  modified_base 16: mod_base = OTHER; note = 2'-O-methoxyethyl guanosine
  modified_base 17: mod_base = OTHER; note = 2'-O-methoxyethyl adenosine
  modified_base 18: mod_base = OTHER; note = 2'-O-methoxyethyl adenosine
  modified_base 19: mod_base = OTHER; note = 2'-O-methoxyethyl guanosine
  modified_base 20: mod_base = OTHER; note = 2'-O-methoxyethyl guanosine
  misc_feature 1..5: note = RNA
  misc_feature 6..15: note = DNA
  misc_feature 16..20: note = RNA
cggtccggcagatgagaagg

SEQ ID NO: 623 - DNA, 20 bp, synthetic construct
  source 1..20: mol_type = other DNA
  modified_base 1: mod_base = OTHER; note = 2'-O-methoxyethyl guanosine
  modified_base 2: mod_base = OTHER; note = 2'-O-methoxyethyl thymidine
  modified_base 3: mod_base = OTHER; note = 2'-O-methoxyethyl 5-methylcytidine
  modified_base 4: mod_base = OTHER; note = 2'-O-methoxyethyl 5-methylcytidine
  modified_base 5: mod_base = OTHER; note = 2'-O-methoxyethyl guanosine
  modified_base 7: mod_base = OTHER; note = 2'-deoxy 5-methylcytidine
  modified_base 16: mod_base = OTHER; note = 2'-O-methoxyethyl adenosine
  modified_base 17: mod_base = OTHER; note = 2'-O-methoxyethyl guanosine
  modified_base 18: mod_base = OTHER; note = 2'-O-methoxyethyl guanosine
  modified_base 19: mod_base = OTHER; note = 2'-O-methoxyethyl 5-methylcytidine
  modified_base 20: mod_base = OTHER; note = 2'-O-methoxyethyl adenosine
  misc_feature 1..5: note = RNA
  misc_feature 6..15: note = DNA
  misc_feature 16..20: note = RNA
gtccggcagatgagaaggca

SEQ ID NO: 624 - DNA, 20 bp, synthetic construct
  source 1..20: mol_type = other DNA
  modified_base 1: mod_base = OTHER; note = 2'-O-methoxyethyl 5-methylcytidine
  modified_base 2: mod_base = OTHER; note = 2'-O-methoxyethyl 5-methylcytidine
  modified_base 3: mod_base = OTHER; note = 2'-O-methoxyethyl guanosine
  modified_base 4: mod_base = OTHER; note = 2'-O-methoxyethyl guanosine
  modified_base 5: mod_base = OTHER; note = 2'-O-methoxyethyl 5-methylcytidine
  modified_base 16: mod_base = OTHER; note = 2'-O-methoxyethyl guanosine
  modified_base 17: mod_base = OTHER; note = 2'-O-methoxyethyl 5-methylcytidine
  modified_base 18: mod_base = OTHER; note = 2'-O-methoxyethyl adenosine
  modified_base 19: mod_base = OTHER; note = 2'-O-methoxyethyl 5-methylcytidine
  modified_base 20: mod_base = OTHER; note = 2'-O-methoxyethyl adenosine
  misc_feature 1..5: note = RNA
  misc_feature 6..15: note = DNA
  misc_feature 16..20: note = RNA
ccggcagatgagaaggcaca

SEQ ID NO: 625 - DNA, 20 bp, synthetic construct
  source 1..20: mol_type = other DNA
  modified_base 1: mod_base = OTHER; note = 2'-O-methoxyethyl guanosine
  modified_base 2: mod_base = OTHER; note = 2'-O-methoxyethyl guanosine
  modified_base 3: mod_base = OTHER; note = 2'-O-methoxyethyl 5-methylcytidine
  modified_base 4: mod_base = OTHER; note = 2'-O-methoxyethyl adenosine
  modified_base 5: mod_base = OTHER; note = 2'-O-methoxyethyl guanosine
  modified_base 15: mod_base = OTHER; note = 2'-deoxy 5-methylcytidine
  modified_base 16: mod_base = OTHER; note = 2'-O-methoxyethyl adenosine
  modified_base 17: mod_base = OTHER; note = 2'-O-methoxyethyl 5-methylcytidine
  modified_base 18: mod_base = OTHER; note = 2'-O-methoxyethyl adenosine
  modified_base 19: mod_base = OTHER; note = 2'-O-methoxyethyl guanosine
  modified_base 20: mod_base = OTHER; note = 2'-O-methoxyethyl adenosine
  misc_feature 1..5: note = RNA
  misc_feature 6..15: note = DNA
  misc_feature 16..20: note = RNA
ggcagatgagaaggcacaga

SEQ ID NO: 626 - DNA, 20 bp, synthetic construct
  source 1..20: mol_type = other DNA
  modified_base 1: mod_base = OTHER; note = 2'-O-methoxyethyl adenosine
  modified_base 2: mod_base = OTHER; note = 2'-O-methoxyethyl adenosine
  modified_base 3: mod_base = OTHER; note = 2'-O-methoxyethyl guanosine
  modified_base 4: mod_base = OTHER; note = 2'-O-methoxyethyl guanosine
  modified_base 5: mod_base = OTHER; note = 2'-O-methoxyethyl 5-methylcytidine
  modified_base 7: mod_base = OTHER; note = 2'-deoxy 5-methylcytidine
  modified_base 11: mod_base = OTHER; note = 2'-deoxy 5-methylcytidine
  modified_base 16: mod_base = OTHER; note = 2'-O-methoxyethyl adenosine
  modified_base 17: mod_base = OTHER; note = 2'-O-methoxyethyl guanosine
  modified_base 18: mod_base = OTHER; note = 2'-O-methoxyethyl thymidine
  modified_base 19: mod_base = OTHER; note = 2'-O-methoxyethyl 5-methylcytidine
  modified_base 20: mod_base = OTHER; note = 2'-O-methoxyethyl 5-methylcytidine
  misc_feature 1..5: note = RNA
  misc_feature 6..15: note = DNA
  misc_feature 16..20: note = RNA
aaggcacagacggggagtcc

SEQ ID NO: 627 - DNA, 20 bp, synthetic construct
  source 1..20: mol_type = other DNA
  modified_base 1: mod_base = OTHER; note = 2'-O-methoxyethyl guanosine
  modified_base 2: mod_base = OTHER; note = 2'-O-methoxyethyl guanosine
  modified_base 3: mod_base = OTHER; note = 2'-O-methoxyethyl 5-methylcytidine
  modified_base 4: mod_base = OTHER; note = 2'-O-methoxyethyl adenosine
  modified_base 5: mod_base = OTHER; note = 2'-O-methoxyethyl 5-methylcytidine
  modified_base 9: mod_base = OTHER; note = 2'-deoxy 5-methylcytidine
  modified_base 16: mod_base = OTHER; note = 2'-O-methoxyethyl thymidine
  modified_base 17: mod_base = OTHER; note = 2'-O-methoxyethyl 5-methylcytidine
  modified_base 18: mod_base = OTHER; note = 2'-O-methoxyethyl 5-methylcytidine
  modified_base 19: mod_base = OTHER; note = 2'-O-methoxyethyl guanosine
  modified_base 20: mod_base = OTHER; note = 2'-O-methoxyethyl 5-methylcytidine
  misc_feature 1..5: note = RNA
  misc_feature 6..15: note = DNA
  misc_feature 16..20: note = RNA
ggcacagacggggagtccgc

SEQ ID NO: 628 - DNA, 20 bp, synthetic construct
  source 1..20: mol_type = other DNA
  modified_base 1: mod_base = OTHER; note = 2'-O-methoxyethyl 5-methylcytidine
  modified_base 2: mod_base = OTHER; note = 2'-O-methoxyethyl adenosine
  modified_base 3: mod_base = OTHER; note = 2'-O-methoxyethyl 5-methylcytidine
  modified_base 4: mod_base = OTHER; note = 2'-O-methoxyethyl adenosine
  modified_base 5: mod_base = OTHER; note = 2'-O-methoxyethyl guanosine
  modified_base 7: mod_base = OTHER; note = 2'-deoxy 5-methylcytidine
  modified_base 15: mod_base = OTHER; note = 2'-deoxy 5-methylcytidine
  modified_base 16: mod_base = OTHER; note = 2'-O-methoxyethyl 5-methylcytidine
  modified_base 17: mod_base = OTHER; note = 2'-O-methoxyethyl guanosine
  modified_base 18: mod_base = OTHER; note = 2'-O-methoxyethyl 5-methylcytidine
  modified_base 19: mod_base = OTHER; note = 2'-O-methoxyethyl guanosine
  modified_base 20: mod_base = OTHER; note = 2'-O-methoxyethyl thymidine
  misc_feature 1..5: note = RNA
  misc_feature 6..15: note = DNA
  misc_feature 16..20: note = RNA
cacagacggggagtccgcgt

SEQ ID NO: 629 - DNA, 20 bp, synthetic construct
  source 1..20: mol_type = other DNA
  modified_base 1: mod_base = OTHER; note = 2'-O-methoxyethyl guanosine
  modified_base 2: mod_base = OTHER; note = 2'-O-methoxyethyl adenosine
  modified_base 3: mod_base = OTHER; note = 2'-O-methoxyethyl guanosine
  modified_base 4: mod_base = OTHER; note = 2'-O-methoxyethyl thymidine
  modified_base 5: mod_base = OTHER; note = 2'-O-methoxyethyl 5-methylcytidine
  modified_base 6: mod_base = OTHER; note = 2'-deoxy 5-methylcytidine
  modified_base 8: mod_base = OTHER; note = 2'-deoxy 5-methylcytidine
  modified_base 16: mod_base = OTHER; note = 2'-O-methoxyethyl guanosine
  modified_base 17: mod_base = OTHER; note = 2'-O-methoxyethyl adenosine
  modified_base 18: mod_base = OTHER; note = 2'-O-methoxyethyl guanosine
  modified_base 19: mod_base = OTHER; note = 2'-O-methoxyethyl guanosine
  modified_base 20: mod_base = OTHER; note = 2'-O-methoxyethyl thymidine
  misc_feature 1..5: note = RNA
  misc_feature 6..15: note = DNA
  misc_feature 16..20: note = RNA
gagtccgcgtaaagagaggt

SEQ ID NO: 630 - DNA, 20 bp, synthetic construct
  source 1..20: mol_type = other DNA
  modified_base 1: mod_base = OTHER; note = 2'-O-methoxyethyl adenosine
  modified_base 2: mod_base = OTHER; note = 2'-O-methoxyethyl guanosine
  modified_base 3: mod_base = OTHER; note = 2'-O-methoxyethyl thymidine
  modified_base 4: mod_base = OTHER; note = 2'-O-methoxyethyl 5-methylcytidine
  modified_base 5: mod_base = OTHER; note = 2'-O-methoxyethyl 5-methylcytidine
  modified_base 7: mod_base = OTHER; note = 2'-deoxy 5-methylcytidine
  modified_base 16: mod_base = OTHER; note = 2'-O-methoxyethyl adenosine
  modified_base 17: mod_base = OTHER; note = 2'-O-methoxyethyl guanosine
  modified_base 18: mod_base = OTHER; note = 2'-O-methoxyethyl guanosine
  modified_base 19: mod_base = OTHER; note = 2'-O-methoxyethyl thymidine
  modified_base 20: mod_base = OTHER; note = 2'-O-methoxyethyl guanosine
  misc_feature 1..5: note = RNA
  misc_feature 6..15: note = DNA
  misc_feature 16..20: note = RNA
agtccgcgtaaagagaggtg

SEQ ID NO: 631 - DNA, 20 bp, synthetic construct
  source 1..20: mol_type = other DNA
  modified_base 1: mod_base = OTHER; note = 2'-O-methoxyethyl guanosine
  modified_base 2: mod_base = OTHER; note = 2'-O-methoxyethyl thymidine
  modified_base 3: mod_base = OTHER; note = 2'-O-methoxyethyl 5-methylcytidine
  modified_base 4: mod_base = OTHER; note = 2'-O-methoxyethyl 5-methylcytidine
  modified_base 5: mod_base = OTHER; note = 2'-O-methoxyethyl guanosine
  modified_base 6: mod_base = OTHER; note = 2'-deoxy 5-methylcytidine
  modified_base 16: mod_base = OTHER; note = 2'-O-methoxyethyl guanosine
  modified_base 17: mod_base = OTHER; note = 2'-O-methoxyethyl guanosine
  modified_base 18: mod_base = OTHER; note = 2'-O-methoxyethyl thymidine
  modified_base 19: mod_base = OTHER; note = 2'-O-methoxyethyl guanosine
  modified_base 20: mod_base = OTHER; note = 2'-O-methoxyethyl 5-methylcytidine
  misc_feature 1..5: note = RNA
  misc_feature 6..15: note = DNA
  misc_feature 16..20: note = RNA
gtccgcgtaaagagaggtgc

SEQ ID NO: 632 - DNA, 20 bp, synthetic construct
  source 1..20: mol_type = other DNA
  modified_base 1: mod_base = OTHER; note = 2'-O-methoxyethyl thymidine
  modified_base 2: mod_base = OTHER; note = 2'-O-methoxyethyl 5-methylcytidine
  modified_base 3: mod_base = OTHER; note = 2'-O-methoxyethyl 5-methylcytidine
  modified_base 4: mod_base = OTHER; note = 2'-O-methoxyethyl guanosine
  modified_base 5: mod_base = OTHER; note = 2'-O-methoxyethyl 5-methylcytidine
  modified_base 16: mod_base = OTHER; note = 2'-O-methoxyethyl guanosine
  modified_base 17: mod_base = OTHER; note = 2'-O-methoxyethyl thymidine
  modified_base 18: mod_base = OTHER; note = 2'-O-methoxyethyl guanosine
  modified_base 19: mod_base = OTHER; note = 2'-O-methoxyethyl 5-methylcytidine
  modified_base 20: mod_base = OTHER; note = 2'-O-methoxyethyl guanosine
  misc_feature 1..5: note = RNA
  misc_feature 6..15: note = DNA
  misc_feature 16..20: note = RNA
tccgcgtaaagagaggtgcg

SEQ ID NO: 633 - DNA, 20 bp, synthetic construct
  source 1..20: mol_type = other DNA
  modified_base 1: mod_base = OTHER; note = 2'-O-methoxyethyl 5-methylcytidine
  modified_base 2: mod_base = OTHER; note = 2'-O-methoxyethyl 5-methylcytidine
  modified_base 3: mod_base = OTHER; note = 2'-O-methoxyethyl guanosine
  modified_base 4: mod_base = OTHER; note = 2'-O-methoxyethyl 5-methylcytidine
  modified_base 5: mod_base = OTHER; note = 2'-O-methoxyethyl guanosine
  modified_base 16: mod_base = OTHER; note = 2'-O-methoxyethyl thymidine
  modified_base 17: mod_base = OTHER; note = 2'-O-methoxyethyl guanosine
  modified_base 18: mod_base = OTHER; note = 2'-O-methoxyethyl 5-methylcytidine
  modified_base 19: mod_base = OTHER; note = 2'-O-methoxyethyl guanosine
  modified_base 20: mod_base = OTHER; note = 2'-O-methoxyethyl 5-methylcytidine
  misc_feature 1..5: note = RNA
  misc_feature 6..15: note = DNA
  misc_feature 16..20: note = RNA
ccgcgtaaagagaggtgcgc

SEQ ID NO: 634 - DNA, 20 bp, synthetic construct
  source 1..20: mol_type = other DNA
  modified_base 1: mod_base = OTHER; note = 2'-O-methoxyethyl guanosine
  modified_base 2: mod_base = OTHER; note = 2'-O-methoxyethyl 5-methylcytidine
  modified_base 3: mod_base = OTHER; note = 2'-O-methoxyethyl guanosine
  modified_base 4: mod_base = OTHER; note = 2'-O-methoxyethyl thymidine
  modified_base 5: mod_base = OTHER; note = 2'-O-methoxyethyl adenosine
  modified_base 16: mod_base = OTHER; note = 2'-O-methoxyethyl 5-methylcytidine
  modified_base 17: mod_base = OTHER; note = 2'-O-methoxyethyl guanosine
  modified_base 18: mod_base = OTHER; note = 2'-O-methoxyethyl 5-methylcytidine
  modified_base 19: mod_base = OTHER; note = 2'-O-methoxyethyl 5-methylcytidine
  modified_base 20: mod_base = OTHER; note = 2'-O-methoxyethyl 5-methylcytidine
  misc_feature 1..5: note = RNA
  misc_feature 6..15: note = DNA
  misc_feature 16..20: note = RNA
gcgtaaagagaggtgcgccc

SEQ ID NO: 635 - DNA, 20 bp, synthetic construct
  source 1..20: mol_type = other DNA
  modified_base 1: mod_base = OTHER; note = 2'-O-methoxyethyl guanosine
  modified_base 2: mod_base = OTHER; note = 2'-O-methoxyethyl thymidine
  modified_base 3: mod_base = OTHER; note = 2'-O-methoxyethyl adenosine
  modified_base 4: mod_base = OTHER; note = 2'-O-methoxyethyl adenosine
  modified_base 5: mod_base = OTHER; note = 2'-O-methoxyethyl adenosine
  modified_base 14: mod_base = OTHER; note = 2'-deoxy 5-methylcytidine
  modified_base 16: mod_base = OTHER; note = 2'-O-methoxyethyl 5-methylcytidine
  modified_base 17: mod_base = OTHER; note = 2'-O-methoxyethyl 5-methylcytidine
  modified_base 18: mod_base = OTHER; note = 2'-O-methoxyethyl 5-methylcytidine
  modified_base 19: mod_base = OTHER; note = 2'-O-methoxyethyl 5-methylcytidine
  modified_base 20: mod_base = OTHER; note = 2'-O-methoxyethyl guanosine
  misc_feature 1..5: note = RNA
  misc_feature 6..15: note = DNA
  misc_feature 16..20: note = RNA
gtaaagagaggtgcgccccg

SEQ ID NO: 636 - DNA, 20 bp, synthetic construct
  source 1..20: mol_type = other DNA
  modified_base 1: mod_base = OTHER; note = 2'-O-methoxyethyl adenosine
  modified_base 2: mod_base = OTHER; note = 2'-O-methoxyethyl adenosine
  modified_base 3: mod_base = OTHER; note = 2'-O-methoxyethyl adenosine
  modified_base 4: mod_base = OTHER; note = 2'-O-methoxyethyl guanosine
  modified_base 5: mod_base = OTHER; note = 2'-O-methoxyethyl adenosine
  modified_base 12: mod_base = OTHER; note = 2'-deoxy 5-methylcytidine
  modified_base 14: mod_base = OTHER; note = 2'-deoxy 5-methylcytidine
  modified_base 15: mod_base = OTHER; note = 2'-deoxy 5-methylcytidine
  modified_base 16: mod_base = OTHER; note = 2'-O-methoxyethyl 5-methylcytidine
  modified_base 17: mod_base = OTHER; note = 2'-O-methoxyethyl 5-methylcytidine
  modified_base 18: mod_base = OTHER; note = 2'-O-methoxyethyl guanosine
  modified_base 19: mod_base = OTHER; note = 2'-O-methoxyethyl thymidine
  modified_base 20: mod_base = OTHER; note = 2'-O-methoxyethyl guanosine
  misc_feature 1..5: note = RNA
  misc_feature 6..15: note = DNA
  misc_feature 16..20: note = RNA
aaagagaggtgcgccccgtg

SEQ ID NO: 637 - DNA, 20 bp, synthetic construct
  source 1..20: mol_type = other DNA
  modified_base 1: mod_base = OTHER; note = 2'-O-methoxyethyl guanosine
  modified_base 2: mod_base = OTHER; note = 2'-O-methoxyethyl 5-methylcytidine
  modified_base 3: mod_base = OTHER; note = 2'-O-methoxyethyl guanosine
  modified_base 4: mod_base = OTHER; note = 2'-O-methoxyethyl adenosine
  modified_base 5: mod_base = OTHER; note = 2'-O-methoxyethyl adenosine
  modified_base 9: mod_base = OTHER; note = 2'-deoxy 5-methylcytidine
  modified_base 11: mod_base = OTHER; note = 2'-deoxy 5-methylcytidine
  modified_base 13: mod_base = OTHER; note = 2'-deoxy 5-methylcytidine
  modified_base 16: mod_base = OTHER; note = 2'-O-methoxyethyl thymidine
  modified_base 17: mod_base = OTHER; note = 2'-O-methoxyethyl 5-methylcytidine
  modified_base 18: mod_base = OTHER; note = 2'-O-methoxyethyl 5-methylcytidine
  modified_base 19: mod_base = OTHER; note = 2'-O-methoxyethyl guanosine
  modified_base 20: mod_base = OTHER; note = 2'-O-methoxyethyl guanosine
  misc_feature 1..5: note = RNA
  misc_feature 6..15: note = DNA
  misc_feature 16..20: note = RNA
gcgaagtgcacacggtccgg

SEQ ID NO: 638 - DNA, 20 bp, synthetic construct
  source 1..20: mol_type = other DNA
  modified_base 1: mod_base = OTHER; note = 2'-O-methoxyethyl guanosine
  modified_base 2: mod_base = OTHER; note = 2'-O-methoxyethyl thymidine
  modified_base 3: mod_base = OTHER; note = 2'-O-methoxyethyl 5-methylcytidine
  modified_base 4: mod_base = OTHER; note = 2'-O-methoxyethyl 5-methylcytidine
  modified_base 5: mod_base = OTHER; note = 2'-O-methoxyethyl guanosine
  modified_base 6: mod_base = OTHER; note = 2'-deoxy 5-methylcytidine
  modified_base 16: mod_base = OTHER; note = 2'-O-methoxyethyl guanosine
  modified_base 17: mod_base = OTHER; note = 2'-O-methoxyethyl guanosine
  modified_base 18: mod_base = OTHER; note = 2'-O-methoxyethyl thymidine
  modified_base 19: mod_base = OTHER; note = 2'-O-methoxyethyl guanosine
  modified_base 20: mod_base = OTHER; note = 2'-O-methoxyethyl 5-methylcytidine
  misc_feature 1..5: note = RNA
  misc_feature 6..15: note = DNA
  misc_feature 16..20: note = RNA
gtccgcgtaaagagaggtgc

SEQ ID NO: 639 - DNA, 20 bp, synthetic construct
  source 1..20: mol_type = other DNA
  modified_base 1: mod_base = OTHER; note = 2'-O-methoxyethyl guanosine
  modified_base 2: mod_base = OTHER; note = 2'-O-methoxyethyl thymidine
  modified_base 3: mod_base = OTHER; note = 2'-O-methoxyethyl guanosine
  modified_base 4: mod_base = OTHER; note = 2'-O-methoxyethyl adenosine
  modified_base 5: mod_base = OTHER; note = 2'-O-methoxyethyl adenosine
  modified_base 7: mod_base = OTHER; note = 2'-deoxy 5-methylcytidine
  modified_base 14: mod_base = OTHER; note = 2'-deoxy 5-methylcytidine
  modified_base 16: mod_base = OTHER; note = 2'-O-methoxyethyl 5-methylcytidine
  modified_base 17: mod_base = OTHER; note = 2'-O-methoxyethyl adenosine
  modified_base 18: mod_base = OTHER; note = 2'-O-methoxyethyl 5-methylcytidine
  modified_base 19: mod_base = OTHER; note = 2'-O-methoxyethyl guanosine
  modified_base 20: mod_base = OTHER; note = 2'-O-methoxyethyl guanosine
  misc_feature 1..5: note = RNA
  misc_feature 6..15: note = DNA
  misc_feature 16..20: note = RNA
gtgaagcgaagtgcacacgg

SEQ ID NO: 640 - DNA, 20 bp, synthetic construct
  source 1..20: mol_type = other DNA
  modified_base 1: mod_base = OTHER; note = 2'-O-methoxyethyl 5-methylcytidine
  modified_base 2: mod_base = OTHER; note = 2'-O-methoxyethyl 5-methylcytidine
  modified_base 3: mod_base = OTHER; note = 2'-O-methoxyethyl thymidine
  modified_base 4: mod_base = OTHER; note = 2'-O-methoxyethyl thymidine
  modified_base 5: mod_base = OTHER; note = 2'-O-methoxyethyl 5-methylcytidine
  modified_base 6: mod_base = OTHER; note = 2'-deoxy 5-methylcytidine
  modified_base 7: mod_base = OTHER; note = 2'-deoxy 5-methylcytidine
  modified_base 16: mod_base = OTHER; note = 2'-O-methoxyethyl 5-methylcytidine
  modified_base 17: mod_base = OTHER; note = 2'-O-methoxyethyl 5-methylcytidine
  modified_base 18: mod_base = OTHER; note = 2'-O-methoxyethyl thymidine
  modified_base 19: mod_base = OTHER; note = 2'-O-methoxyethyl 5-methylcytidine
  modified_base 20: mod_base = OTHER; note = 2'-O-methoxyethyl 5-methylcytidine
  misc_feature 1..5: note = RNA
  misc_feature 6..15: note = DNA
  misc_feature 16..20: note = RNA
ccttccctgaaggttcctcc

SEQ ID NO: 641 - DNA, 20 bp, synthetic construct
  source 1..20: mol_type = other DNA
  modified_base 1: mod_base = OTHER; note = 2'-O-methoxyethyl guanosine
  modified_base 2: mod_base = OTHER; note = 2'-O-methoxyethyl guanosine
  modified_base 3: mod_base = OTHER; note = 2'-O-methoxyethyl thymidine
  modified_base 4: mod_base = OTHER; note = 2'-O-methoxyethyl 5-methylcytidine
  modified_base 5: mod_base = OTHER; note = 2'-O-methoxyethyl 5-methylcytidine
  modified_base 8: mod_base = OTHER; note = 2'-deoxy 5-methylcytidine
  modified_base 16: mod_base = OTHER; note = 2'-O-methoxyethyl adenosine
  modified_base 17: mod_base = OTHER; note = 2'-O-methoxyethyl adenosine
  modified_base 18: mod_base = OTHER; note = 2'-O-methoxyethyl guanosine
  modified_base 19: mod_base = OTHER; note = 2'-O-methoxyethyl guanosine
  modified_base 20: mod_base = OTHER; note = 2'-O-methoxyethyl 5-methylcytidine
  misc_feature 1..5: note = RNA
  misc_feature 6..15: note = DNA
  misc_feature 16..20: note = RNA
ggtccggcagatgagaaggc

SEQ ID NO: 642 - DNA, 20 bp, synthetic construct
  source 1..20: mol_type = other DNA
  modified_base 1: mod_base = OTHER; note = 2'-O-methoxyethyl guanosine
  modified_base 2: mod_base = OTHER; note = 2'-O-methoxyethyl thymidine
  modified_base 3: mod_base = OTHER; note = 2'-O-methoxyethyl 5-methylcytidine
  modified_base 4: mod_base = OTHER; note = 2'-O-methoxyethyl 5-methylcytidine
  modified_base 5: mod_base = OTHER; note = 2'-O-methoxyethyl guanosine
  modified_base 6: mod_base = OTHER; note = 2'-deoxy 5-methylcytidine
  modified_base 16: mod_base = OTHER; note = 2'-O-methoxyethyl guanosine
  modified_base 17: mod_base = OTHER; note = 2'-O-methoxyethyl guanosine
  modified_base 18: mod_base = OTHER; note = 2'-O-methoxyethyl thymidine
  modified_base 19: mod_base = OTHER; note = 2'-O-methoxyethyl guanosine
  modified_base 20: mod_base = OTHER; note = 2'-O-methoxyethyl 5-methylcytidine
  misc_feature 1..5: note = RNA
  misc_feature 6..15: note = DNA
  misc_feature 16..20: note = RNA
gtccgcgtaaagagaggtgc

SEQ ID NO: 643 - DNA, 20 bp, synthetic construct
  source 1..20: mol_type = other DNA
  modified_base 1: mod_base = OTHER; note = 2'-O-methoxyethyl guanosine
  modified_base 2: mod_base = OTHER; note = 2'-O-methoxyethyl thymidine
  modified_base 3: mod_base = OTHER; note = 2'-O-methoxyethyl guanosine
  modified_base 4: mod_base = OTHER; note = 2'-O-methoxyethyl adenosine
  modified_base 5: mod_base = OTHER; note = 2'-O-methoxyethyl adenosine
  modified_base 7: mod_base = OTHER; note = 2'-deoxy 5-methylcytidine
  modified_base 14: mod_base = OTHER; note = 2'-deoxy 5-methylcytidine
  modified_base 16: mod_base = OTHER; note = 2'-O-methoxyethyl 5-methylcytidine
  modified_base 17: mod_base = OTHER; note = 2'-O-methoxyethyl adenosine
  modified_base 18: mod_base = OTHER; note = 2'-O-methoxyethyl 5-methylcytidine
  modified_base 19: mod_base = OTHER; note = 2'-O-methoxyethyl guanosine
  modified_base 20: mod_base = OTHER; note = 2'-O-methoxyethyl guanosine
  misc_feature 1..5: note = RNA
  misc_feature 6..15: note = DNA
  misc_feature 16..20: note = RNA
gtgaagcgaagtgcacacgg

SEQ ID NO: 644 - DNA, 22 bp, synthetic construct
  source 1..22: mol_type = other DNA
  modified_base 1: mod_base = OTHER; note = 2'-O-methoxyethyl uridine
  modified_base 2: mod_base = OTHER; note = 2'-O-methoxyethyl guanosine
  modified_base 3: mod_base = OTHER; note = 2'-O-methoxyethyl adenosine
  modified_base 4: mod_base = OTHER; note = 2'-O-methoxyethyl 5-methylcytidine
  modified_base 5: mod_base = OTHER; note = 2'-O-methoxyethyl uridine
  modified_base 11: mod_base = OTHER; note = 2'-deoxy 5-methylcytidine
  modified_base 15: mod_base = OTHER; note = 2'-deoxy 5-methylcytidine
  modified_base 18: mod_base = OTHER; note = 2'-O-methoxyethyl guanosine
  modified_base 19: mod_base = OTHER; note = 2'-O-methoxyethyl adenosine
  modified_base 20: mod_base = OTHER; note = 2'-O-methoxyethyl uridine
  modified_base 21: mod_base = OTHER; note = 2'-O-methoxyethyl guanosine
  modified_base 22: mod_base = OTHER; note = 2'-O-methoxyethyl adenosine
  misc_feature 1..5: note = RNA
  misc_feature 6..17: note = DNA
  misc_feature 18..22: note = RNA
tgactgtgaacgttcgagatga

SEQ ID NO: 645 - DNA, 22 bp, synthetic construct
  source 1..22: mol_type = other DNA
  modified_base 1: mod_base = OTHER; note = 2'-O-methoxyethyl uridine
  modified_base 2: mod_base = OTHER; note = 2'-O-methoxyethyl guanosine
  modified_base 3: mod_base = OTHER; note = 2'-O-methoxyethyl adenosine
  modified_base 4: mod_base = OTHER; note = 2'-O-methoxyethyl cytidine
  modified_base 5: mod_base = OTHER; note = 2'-O-methoxyethyl uridine
  modified_base 11: mod_base = OTHER; note = 2'-deoxy 5-methylcytidine
  modified_base 15: mod_base = OTHER; note = 2'-deoxy 5-methylcytidine
  modified_base 18: mod_base = OTHER; note = 2'-O-methoxyethyl guanosine
  modified_base 19: mod_base = OTHER; note = 2'-O-methoxyethyl adenosine
  modified_base 20: mod_base = OTHER; note = 2'-O-methoxyethyl uridine
  modified_base 21: mod_base = OTHER; note = 2'-O-methoxyethyl guanosine
  modified_base 22: mod_base = OTHER; note = 2'-O-methoxyethyl adenosine
  misc_feature 1..5: note = RNA
  misc_feature 6..17: note = DNA
  misc_feature 18..22: note = RNA
tgactgtgaacgttcgagatga

SEQ ID NO: 646 - DNA, 22 bp, synthetic construct
  source 1..22: mol_type = other DNA
  modified_base 1: mod_base = OTHER; note = 2'-O-methyl uridine
  modified_base 2: mod_base = OTHER; note = 2'-O-methyl guanosine
  modified_base 3: mod_base = OTHER; note = 2'-O-methyl adenosine
  modified_base 4: mod_base = OTHER; note = 2'-O-methoxyethyl cytidine
  modified_base 5: mod_base = OTHER; note = 2'-O-methyl uridine
  modified_base 11: mod_base = OTHER; note = 2'-deoxy 5-methylcytidine
  modified_base 15: mod_base = OTHER; note = 2'-deoxy 5-methylcytidine
  modified_base 18: mod_base = OTHER; note = 2'-O-methyl guanosine
  modified_base 19: mod_base = OTHER; note = 2'-O-methyl adenosine
  modified_base 20: mod_base = OTHER; note = 2'-O-methyl uridine
  modified_base 21: mod_base = OTHER; note = 2'-O-methyl guanosine
  modified_base 22: mod_base = OTHER; note = 2'-O-methyl adenosine
  misc_feature 1..5: note = RNA
  misc_feature 6..17: note = DNA
  misc_feature 18..22: note = RNA
tgactgtgaacgttcgagatga

SEQ ID NO: 647 - DNA, 22 bp, synthetic construct
  source 1..22: mol_type = other DNA
  modified_base 1: mod_base = OTHER; note = 2'-O-methoxyethyl uridine
  modified_base 2: mod_base = OTHER; note = 2'-O-methoxyethyl guanosine
  modified_base 3: mod_base = OTHER; note = 2'-O-methoxyethyl adenosine
  modified_base 4: mod_base = OTHER; note = 2'-O-methoxyethyl cytidine
  modified_base 5: mod_base = OTHER; note = 2'-O-methoxyethyl uridine
  modified_base 11: mod_base = OTHER; note = 2'-deoxy 5-methylcytidine
  modified_base 15: mod_base = OTHER; note = 2'-deoxy 5-methylcytidine
  modified_base 18: mod_base = OTHER; note = Locked nucleic acid with guanine base
  modified_base 19: mod_base = OTHER; note = Locked nucleic acid with adenine base
  modified_base 20: mod_base = OTHER; note = Locked nucleic acid with thymine base
  modified_base 21: mod_base = OTHER; note = Locked nucleic acid with guanine base
  modified_base 22: mod_base = OTHER; note = Locked nucleic acid with adenine base
  misc_feature 1..5: note = RNA
  misc_feature 6..17: note = DNA
  misc_feature 18..22: note = RNA
tgactgtgaacgttcgagatga

SEQ ID NO: 648 - DNA, 22 bp, synthetic construct
  source 1..22: mol_type = other DNA
  modified_base 1: mod_base = OTHER; note = Locked nucleic acid with thymine base
  modified_base 2: mod_base = OTHER; note = Locked nucleic acid with guanine base
  modified_base 3: mod_base = OTHER; note = Locked nucleic acid with adenine base
  modified_base 4: mod_base = OTHER; note = Locked nucleic acid with cytosine base
  modified_base 5: mod_base = OTHER; note = Locked nucleic acid with thymine base
  modified_base 11: mod_base = OTHER; note = 2'-deoxy 5-methylcytidine
  modified_base 15: mod_base = OTHER; note = 2'-deoxy 5-methylcytidine
  modified_base 18: mod_base = OTHER; note = Locked nucleic acid with guanine base
  modified_base 19: mod_base = OTHER; note = Locked nucleic acid with adenine base
  modified_base 20: mod_base = OTHER; note = Locked nucleic acid with thymine base
  modified_base 21: mod_base = OTHER; note = Locked nucleic acid with guanine base
  modified_base 22: mod_base = OTHER; note = Locked nucleic acid with adenine base
  misc_feature 1..5: note = RNA
  misc_feature 6..17: note = DNA
  misc_feature 18..22: note = RNA
tgactgtgaacgttcgagatga

SEQ ID NO: 649 - DNA, 20 bp, synthetic construct
  source 1..20: mol_type = other DNA
  modified_base 1: mod_base = OTHER; note = 2'-O-methoxyethyl 5-methylcytidine
  modified_base 2: mod_base = OTHER; note = 2'-O-methoxyethyl 5-methylcytidine
  modified_base 3: mod_base = OTHER; note = 2'-O-methoxyethyl guanosine
  modified_base 4: mod_base = OTHER; note = 2'-O-methoxyethyl guanosine
  modified_base 5: mod_base = OTHER; note = 2'-O-methoxyethyl 5-methylcytidine
  modified_base 16: mod_base = OTHER; note = 2'-O-methoxyethyl guanosine
  modified_base 17: mod_base = OTHER; note = 2'-O-methoxyethyl 5-methylcytidine
  modified_base 18: mod_base = OTHER; note = 2'-O-methoxyethyl adenosine
  modified_base 19: mod_base = OTHER; note = 2'-O-methoxyethyl 5-methylcytidine
  modified_base 20: mod_base = OTHER; note = 2'-O-methoxyethyl adenosine
  misc_feature 1..5: note = RNA
  misc_feature 6..15: note = DNA
  misc_feature 16..20: note = RNA
ccggcagatgagaaggcaca

SEQ ID NO: 650 - DNA, 20 bp, synthetic construct
  source 1..20: mol_type = other DNA
  modified_base 1: mod_base = OTHER; note = 2'-O-methoxyethyl guanosine
  modified_base 2: mod_base = OTHER; note = 2'-O-methoxyethyl 5-methylcytidine
  modified_base 3: mod_base = OTHER; note = 2'-O-methoxyethyl guanosine
  modified_base 4: mod_base = OTHER; note = 2'-O-methoxyethyl adenosine
  modified_base 5: mod_base = OTHER; note = 2'-O-methoxyethyl adenosine
  modified_base 9: mod_base = OTHER; note = 2'-deoxy 5-methylcytidine
  modified_base 11: mod_base = OTHER; note = 2'-deoxy 5-methylcytidine
  modified_base 13: mod_base = OTHER; note = 2'-deoxy 5-methylcytidine
  modified_base 16: mod_base = OTHER; note = 2'-O-methoxyethyl thymidine
  modified_base 17: mod_base = OTHER; note = 2'-O-methoxyethyl 5-methylcytidine
  modified_base 18: mod_base = OTHER; note = 2'-O-methoxyethyl 5-methylcytidine
  modified_base 19: mod_base = OTHER; note = 2'-O-methoxyethyl guanosine
  modified_base 20: mod_base = OTHER; note = 2'-O-methoxyethyl guanosine
  misc_feature 1..5: note = RNA
  misc_feature 6..15: note = DNA
  misc_feature 16..20: note = RNA
gcgaagtgcacacggtccgg

SEQ ID NO: 651 - DNA, 20 bp, synthetic construct
  source 1..20: mol_type = other DNA
  modified_base 1: mod_base = OTHER; note = 2'-O-methoxyethyl guanosine
  modified_base 2: mod_base = OTHER; note = 2'-O-methoxyethyl thymidine
  modified_base 3: mod_base = OTHER; note = 2'-O-methoxyethyl 5-methylcytidine
  modified_base 4: mod_base = OTHER; note = 2'-O-methoxyethyl 5-methylcytidine
  modified_base 5: mod_base = OTHER; note = 2'-O-methoxyethyl guanosine
  modified_base 6: mod_base = OTHER; note = 2'-deoxy 5-methylcytidine
  modified_base 16: mod_base = OTHER; note = 2'-O-methoxyethyl guanosine
  modified_base 17: mod_base = OTHER; note = 2'-O-methoxyethyl guanosine
  modified_base 18: mod_base = OTHER; note = 2'-O-methoxyethyl thymidine
  modified_base 19: mod_base = OTHER; note = 2'-O-methoxyethyl guanosine
  modified_base 20: mod_base = OTHER; note = 2'-O-methoxyethyl 5-methylcytidine
  misc_feature 1..5: note = RNA
  misc_feature 6..15: note = DNA
  misc_feature 16..20: note = RNA
gtccgcgtaaagagaggtgc

SEQ ID NO: 652 - DNA, 20 bp, synthetic construct
  source 1..20: mol_type = other DNA
  modified_base 1: mod_base = OTHER; note = 2'-O-methoxyethyl guanosine
  modified_base 2: mod_base = OTHER; note = 2'-O-methoxyethyl thymidine
  modified_base 3: mod_base = OTHER; note = 2'-O-methoxyethyl guanosine
  modified_base 4: mod_base = OTHER; note = 2'-O-methoxyethyl adenosine
  modified_base 5: mod_base = OTHER; note = 2'-O-methoxyethyl adenosine
  modified_base 7: mod_base = OTHER; note = 2'-deoxy 5-methylcytidine
  modified_base 14: mod_base = OTHER; note = 2'-deoxy 5-methylcytidine
  modified_base 16: mod_base = OTHER; note = 2'-O-methoxyethyl 5-methylcytidine
  modified_base 17: mod_base = OTHER; note = 2'-O-methoxyethyl adenosine
  modified_base 18: mod_base = OTHER; note = 2'-O-methoxyethyl 5-methylcytidine
  modified_base 19: mod_base = OTHER; note = 2'-O-methoxyethyl guanosine
  modified_base 20: mod_base = OTHER; note = 2'-O-methoxyethyl guanosine
  misc_feature 1..5: note = RNA
  misc_feature 6..15: note = DNA
  misc_feature 16..20: note = RNA
gtgaagcgaagtgcacacgg

SEQ ID NO: 653 - DNA, 20 bp, synthetic construct
  source 1..20: mol_type = other DNA
  modified_base 1: mod_base = OTHER; note = 2'-O-methoxyethyl guanosine
  modified_base 2: mod_base = OTHER; note = 2'-O-methoxyethyl thymidine
  modified_base 3: mod_base = OTHER; note = 2'-O-methoxyethyl guanosine
  modified_base 4: mod_base = OTHER; note = 2'-O-methoxyethyl adenosine
  modified_base 5: mod_base = OTHER; note = 2'-O-methoxyethyl adenosine
  modified_base 7: mod_base = OTHER; note = 2'-deoxy 5-methylcytidine
  modified_base 8: mod_base = OTHER; note = 2'-O-methoxyethyl guanosine
  modified_base 14: mod_base = OTHER; note = 2'-deoxy 5-methylcytidine
  modified_base 16: mod_base = OTHER; note = 2'-O-methoxyethyl 5-methylcytidine
  modified_base 17: mod_base = OTHER; note = 2'-O-methoxyethyl adenosine
  modified_base 18: mod_base = OTHER; note = 2'-O-methoxyethyl 5-methylcytidine
  modified_base 19: mod_base = OTHER; note = 2'-O-methoxyethyl guanosine
  modified_base 20: mod_base = OTHER; note = 2'-O-methoxyethyl guanosine
  misc_feature 1..5: note = RNA
  misc_feature 6..7: note = DNA
  misc_feature 8: note = RNA
  misc_feature 9..15: note = DNA
  misc_feature 16..20: note = RNA
gtgaagcgaagtgcacacgg

SEQ ID NO: 654 - DNA, 20 bp, synthetic construct
  source 1..20: mol_type = other DNA
  modified_base 1: mod_base = OTHER; note = 2'-O-methoxyethyl guanosine
  modified_base 2: mod_base = OTHER; note = 2'-O-methoxyethyl thymidine
  modified_base 3: mod_base = OTHER; note = 2'-O-methoxyethyl guanosine
  modified_base 4: mod_base = OTHER; note = 2'-O-methoxyethyl adenosine
  modified_base 5: mod_base = OTHER; note = 2'-O-methoxyethyl adenosine
  modified_base 7: mod_base = OTHER; note = 2'-deoxy 5-methylcytidine
  modified_base 10: mod_base = OTHER; note = 2'-O-methoxyethyl adenosine
  modified_base 14: mod_base = OTHER; note = 2'-deoxy 5-methylcytidine
  modified_base 16: mod_base = OTHER; note = 2'-O-methoxyethyl 5-methylcytidine
  modified_base 17: mod_base = OTHER; note = 2'-O-methoxyethyl adenosine
  modified_base 18: mod_base = OTHER; note = 2'-O-methoxyethyl 5-methylcytidine
  modified_base 19: mod_base = OTHER; note = 2'-O-methoxyethyl guanosine
  modified_base 20: mod_base = OTHER; note = 2'-O-methoxyethyl guanosine
  misc_feature 1..5: note = RNA
  misc_feature 6..9: note = DNA
  misc_feature 10: note = RNA
  misc_feature 11..15: note = DNA
  misc_feature 16..20: note = RNA
gtgaagcgaagtgcacacgg

SEQ ID NO: 655 - DNA, 20 bp, synthetic construct
  source 1..20: mol_type = other DNA
  modified_base 1: mod_base = OTHER; note = 2'-O-methoxyethyl guanosine
  modified_base 2: mod_base = OTHER; note = 2'-O-methoxyethyl thymidine
  modified_base 3: mod_base = OTHER; note = 2'-O-methoxyethyl guanosine
  modified_base 4: mod_base = OTHER; note = 2'-O-methoxyethyl adenosine
  modified_base 5: mod_base = OTHER; note = 2'-O-methoxyethyl adenosine
  modified_base 7: mod_base = OTHER; note = 2'-deoxy 5-methylcytidine
  modified_base 11: mod_base = OTHER; note = 2'-O-methoxyethyl guanosine
  modified_base 14: mod_base = OTHER; note = 2'-deoxy 5-methylcytidine
  modified_base 16: mod_base = OTHER; note = 2'-O-methoxyethyl 5-methylcytidine
  modified_base 17: mod_base = OTHER; note = 2'-O-methoxyethyl adenosine
  modified_base 18: mod_base = OTHER; note = 2'-O-methoxyethyl 5-methylcytidine
  modified_base 19: mod_base = OTHER; note = 2'-O-methoxyethyl guanosine
  modified_base 20: mod_base = OTHER; note = 2'-O-methoxyethyl guanosine
  misc_feature 1..5: note = RNA
  misc_feature 6..10: note = DNA
  misc_feature 11: note = RNA
  misc_feature 12..15: note = DNA
  misc_feature 16..20: note = RNA
gtgaagcgaagtgcacacgg

SEQ ID NO: 656 - DNA, 20 bp, synthetic construct
  source 1..20: mol_type = other DNA
  modified_base 1: mod_base = OTHER; note = 2'-O-methoxyethyl guanosine
  modified_base 2: mod_base = OTHER; note = 2'-O-methoxyethyl thymidine
  modified_base 3: mod_base = OTHER; note = 2'-O-methoxyethyl guanosine
  modified_base 4: mod_base = OTHER; note = 2'-O-methoxyethyl adenosine
  modified_base 5: mod_base = OTHER; note = 2'-O-methoxyethyl adenosine
  modified_base 7: mod_base = OTHER; note = 2'-deoxy 5-methylcytidine
  modified_base 8: mod_base = OTHER; note = 2'-O-methoxyethyl guanosine
  modified_base 11: mod_base = OTHER; note = 2'-O-methoxyethyl guanosine
  modified_base 14: mod_base = OTHER; note = 2'-deoxy 5-methylcytidine
  modified_base 16: mod_base = OTHER; note = 2'-O-methoxyethyl 5-methylcytidine
  modified_base 17: mod_base = OTHER; note = 2'-O-methoxyethyl adenosine
  modified_base 18: mod_base = OTHER; note = 2'-O-methoxyethyl 5-methylcytidine
  modified_base 19: mod_base = OTHER; note = 2'-O-methoxyethyl guanosine
  modified_base 20: mod_base = OTHER; note = 2'-O-methoxyethyl guanosine
  misc_feature 1..5: note = RNA
  misc_feature 6..7: note = DNA
  misc_feature 8: note = RNA
  misc_feature 9..10: note = DNA
  misc_feature 11: note = RNA
  misc_feature 12..15: note = DNA
  misc_feature 16..20: note = RNA
gtgaagcgaagtgcacacgg

SEQ ID NO: 657 - DNA, 20 bp, synthetic construct
  source 1..20: mol_type = other DNA
  modified_base 1: mod_base = OTHER; note = 2'-O-methoxyethyl guanosine
  modified_base 2: mod_base = OTHER; note = 2'-O-methoxyethyl 5-methylcytidine
  modified_base 3: mod_base = OTHER; note = 2'-O-methoxyethyl adenosine
  modified_base 4: mod_base = OTHER; note = 2'-O-methoxyethyl guanosine
  modified_base 5: mod_base = OTHER; note = 2'-O-methoxyethyl adenosine
  modified_base 13: mod_base = OTHER; note = 2'-deoxy 5-methylcytidine
  modified_base 16: mod_base = OTHER; note = 2'-O-methoxyethyl adenosine
  modified_base 17: mod_base = OTHER; note = 2'-O-methoxyethyl guanosine
  modified_base 18: mod_base = OTHER; note = 2'-O-methoxyethyl thymidine
  modified_base 19: mod_base = OTHER; note = 2'-O-methoxyethyl guanosine
  modified_base 20: mod_base = OTHER; note = 2'-O-methoxyethyl 5-methylcytidine
  misc_feature 1..5: note = RNA
  misc_feature 6..15: note = DNA
  misc_feature 16..20: note = RNA
gcagaggtgaagcgaagtgc

SEQ ID NO: 658 - DNA, 20 bp, synthetic construct
  source 1..20: mol_type = other DNA
  modified_base 1: mod_base = OTHER; note = 2'-O-methoxyethyl guanosine
  modified_base 2: mod_base = OTHER; note = 2'-O-methoxyethyl 5-methylcytidine
  modified_base 3: mod_base = OTHER; note = 2'-O-methoxyethyl adenosine
  modified_base 4: mod_base = OTHER; note = 2'-O-methoxyethyl guanosine
  modified_base 10: mod_base = OTHER; note = 2'-O-methoxyethyl adenosine
  modified_base 13: mod_base = OTHER; note = 2'-deoxy 5-methylcytidine
  modified_base 16: mod_base = OTHER; note = 2'-O-methoxyethyl adenosine
  modified_base 17: mod_base = OTHER; note = Locked nucleic acid with guanine base
  modified_base 18: mod_base = OTHER; note = 2'-O-methoxyethyl thymidine
  modified_base 19: mod_base = OTHER; note = Locked nucleic acid with guanine base
  modified_base 20: mod_base = OTHER; note = Locked nucleic acid with 5-methylcytidine base
  misc_feature 1..4: note = RNA
  misc_feature 5..9: note = DNA
  misc_feature 10: note = RNA
  misc_feature 11..15: note = DNA
  misc_feature 16..20: note = RNA
gcagaggtgaagcgaagtgc

SEQ ID NO: 659 - DNA, 20 bp, synthetic construct
  source 1..20: mol_type = other DNA
  modified_base 1: mod_base = OTHER; note = 2'-O-methoxyethyl guanosine
  modified_base 2: mod_base = OTHER; note = 2'-O-methoxyethyl 5-methylcytidine
  modified_base 3: mod_base = OTHER; note = 2'-O-methoxyethyl adenosine
  modified_base 4: mod_base = OTHER; note = 2'-O-methoxyethyl guanosine
  modified_base 10: mod_base = OTHER; note = 2'-O-methoxyethyl adenosine
  modified_base 13: mod_base = OTHER; note = 2'-deoxy 5-methylcytidine
  modified_base 16: mod_base = OTHER; note = 2'-O-methoxyethyl adenosine
  modified_base 17: mod_base = OTHER; note = Locked nucleic acid with guanine base
  modified_base 18: mod_base = OTHER; note = 2'-O-methoxyethyl thymidine
  modified_base 19: mod_base = OTHER; note = Locked nucleic acid with guanine base
  modified_base 20: mod_base = OTHER; note = Locked nucleic acid with 5-methylcytidine base
  misc_feature 1..4: note = RNA
  misc_feature 5..9: note = DNA
  misc_feature 10: note = RNA
  misc_feature 11..15: note = DNA
  misc_feature 16..20: note = RNA
gcagaggtgaagcgaagtgc

SEQ ID NO: 660 - RNA, 40 nt, synthetic construct
  source 1..40: mol_type = other RNA
  modified_base 1: mod_base = OTHER; note = 2'-O-methyl adenosine
  modified_base 2: mod_base = OTHER; note = 2'-O-methyl 5-methylcytidine
  modified_base 3: mod_base = OTHER; note = 2'-O-methyl adenosine
  modified_base 4: mod_base = OTHER; note = 2'-O-methyl 5-methylcytidine
  modified_base 5: mod_base = OTHER; note = 2'-O-methyl adenosine
  modified_base 6: mod_base = OTHER; note = 2'-O-methyl 5-methylcytidine
  modified_base 7: mod_base = OTHER; note = 2'-O-methyl adenosine
  modified_base 8: mod_base = OTHER; note = 2'-O-methyl 5-methylcytidine
  modified_base 9: mod_base = OTHER; note = 2'-O-methyl adenosine
  modified_base 10: mod_base = OTHER; note = 2'-O-methyl 5-methylcytidine
  modified_base 11: mod_base = OTHER; note = 2'-O-methyl adenosine
  modified_base 12: mod_base = OTHER; note = 2'-O-methyl 5-methylcytidine
  modified_base 13: mod_base = OTHER; note = 2'-O-methyl adenosine
  modified_base 14: mod_base = OTHER; note = 2'-O-methyl 5-methylcytidine
  modified_base 15: mod_base = OTHER; note = 2'-O-methyl adenosine
  modified_base 16: mod_base = OTHER; note = 2'-O-methyl 5-methylcytidine
  modified_base 17: mod_base = OTHER; note = 2'-O-methyl adenosine
  modified_base 18: mod_base = OTHER; note = 2'-O-methyl 5-methylcytidine
  modified_base 19: mod_base = OTHER; note = 2'-O-methyl adenosine
  modified_base 20: mod_base = OTHER; note = 2'-O-methyl 5-methylcytidine
  modified_base 21: mod_base = OTHER; note = 2'-O-methyl adenosine
  modified_base 22: mod_base = OTHER; note = 2'-O-methyl 5-methylcytidine
  modified_base 23: mod_base = OTHER; note = 2'-O-methyl adenosine
  modified_base 24: mod_base = OTHER; note = 2'-O-methyl 5-methylcytidine
  modified_base 25: mod_base = OTHER; note = 2'-O-methyl adenosine
  modified_base 26: mod_base = OTHER; note = 2'-O-methyl 5-methylcytidine
  modified_base 27: mod_base = OTHER; note = 2'-O-methyl adenosine
  modified_base 28: mod_base = OTHER; note = 2'-O-methyl 5-methylcytidine
  modified_base 29: mod_base = OTHER; note = 2'-O-methyl adenosine
  modified_base 30: mod_base = OTHER; note = 2'-O-methyl 5-methylcytidine
  modified_base 31: mod_base = OTHER; note = 2'-O-methyl adenosine
  modified_base 32: mod_base = OTHER; note = 2'-O-methyl 5-methylcytidine
  modified_base 33: mod_base = OTHER; note = 2'-O-methyl adenosine
  modified_base 34: mod_base = OTHER; note = 2'-O-methyl 5-methylcytidine
  modified_base 35: mod_base = OTHER; note = 2'-O-methyl adenosine
  modified_base 36: mod_base = OTHER; note = 2'-O-methyl 5-methylcytidine
  modified_base 37: mod_base = OTHER; note = 2'-O-methyl adenosine
  modified_base 38: mod_base = OTHER; note = 2'-O-methyl 5-methylcytidine
  modified_base 39: mod_base = OTHER; note = 2'-O-methyl adenosine
  modified_base 40: mod_base = OTHER; note = 2'-O-methyl 5-methylcytidine
acacacacacacacacacacacacacacacacacacacac

SEQ ID NO: 661 - RNA, 40 nt, synthetic construct; identical to SEQ ID NO: 660
  source 1..40: mol_type = other RNA
  modified_base 1: mod_base = OTHER; note = 2'-O-methyl adenosine
  modified_base 2: mod_base = OTHER; note = 2'-O-methyl 5-methylcytidine
  modified_base 3: mod_base = OTHER; note = 2'-O-methyl adenosine
  modified_base 4: mod_base = OTHER; note = 2'-O-methyl 5-methylcytidine
  modified_base 5: mod_base = OTHER; note = 2'-O-methyl adenosine
  modified_base 6: mod_base = OTHER; note = 2'-O-methyl 5-methylcytidine
  modified_base 7: mod_base = OTHER; note = 2'-O-methyl adenosine
  modified_base 8: mod_base = OTHER; note = 2'-O-methyl 5-methylcytidine
  modified_base 9: mod_base = OTHER; note = 2'-O-methyl adenosine
  modified_base 10: mod_base = OTHER; note = 2'-O-methyl 5-methylcytidine
  modified_base 11: mod_base = OTHER; note = 2'-O-methyl adenosine
  modified_base 12: mod_base = OTHER; note = 2'-O-methyl 5-methylcytidine
  modified_base 13: mod_base = OTHER; note = 2'-O-methyl adenosine
  modified_base 14: mod_base = OTHER; note = 2'-O-methyl 5-methylcytidine
  modified_base 15: mod_base = OTHER; note = 2'-O-methyl adenosine
  modified_base 16: mod_base = OTHER; note = 2'-O-methyl 5-methylcytidine
  modified_base 17: mod_base = OTHER; note = 2'-O-methyl adenosine
  modified_base 18: mod_base = OTHER; note = 2'-O-methyl 5-methylcytidine
  modified_base 19: mod_base = OTHER; note = 2'-O-methyl adenosine
  modified_base 20: mod_base = OTHER; note = 2'-O-methyl 5-methylcytidine
  modified_base 21: mod_base = OTHER; note = 2'-O-methyl adenosine
  modified_base 22: mod_base = OTHER; note = 2'-O-methyl 5-methylcytidine
  modified_base 23: mod_base = OTHER; note = 2'-O-methyl adenosine
  modified_base 24: mod_base = OTHER; note = 2'-O-methyl 5-methylcytidine
  modified_base 25: mod_base = OTHER; note = 2'-O-methyl adenosine
  modified_base 26: mod_base = OTHER; note = 2'-O-methyl 5-methylcytidine
  modified_base 27: mod_base = OTHER; note = 2'-O-methyl adenosine
  modified_base 28: mod_base = OTHER; note = 2'-O-methyl 5-methylcytidine
  modified_base 29: mod_base = OTHER; note = 2'-O-methyl adenosine
  modified_base 30: mod_base = OTHER; note = 2'-O-methyl 5-methylcytidine
  modified_base 31: mod_base = OTHER; note = 2'-O-methyl adenosine
  modified_base 32: mod_base = OTHER; note = 2'-O-methyl 5-methylcytidine
  modified_base 33: mod_base = OTHER; note = 2'-O-methyl adenosine
  modified_base 34: mod_base = OTHER; note = 2'-O-methyl 5-methylcytidine
  modified_base 35: mod_base = OTHER; note = 2'-O-methyl adenosine
  modified_base 36: mod_base = OTHER; note = 2'-O-methyl 5-methylcytidine
  modified_base 37: mod_base = OTHER; note = 2'-O-methyl adenosine
  modified_base 38: mod_base = OTHER; note = 2'-O-methyl 5-methylcytidine
  modified_base 39: mod_base = OTHER; note = 2'-O-methyl adenosine
  modified_base 40: mod_base = OTHER; note = 2'-O-methyl 5-methylcytidine

SEQ ID NO: 662 - DNA, 40 bp, synthetic construct
  source 1..40: mol_type = other DNA
  modified_base 2: mod_base = OTHER; note = 2'-deoxy cytidine
  modified_base 4: mod_base = OTHER; note = 2'-deoxy cytidine
  modified_base 6: mod_base = OTHER; note = 2'-deoxy cytidine
  modified_base 8: mod_base = OTHER; note = 2'-deoxy cytidine
  modified_base 10: mod_base = OTHER; note = 2'-deoxy cytidine
  modified_base 12: mod_base = OTHER; note = 2'-deoxy cytidine
  modified_base 14: mod_base = OTHER; note = 2'-deoxy cytidine
  modified_base 16: mod_base = OTHER; note = 2'-deoxy cytidine
  modified_base 18: mod_base = OTHER; note = 2'-deoxy cytidine
  modified_base 20: mod_base = OTHER; note = 2'-deoxy cytidine
  modified_base 22: mod_base = OTHER; note = 2'-deoxy cytidine
  modified_base 24: mod_base = OTHER; note = 2'-deoxy cytidine
  modified_base 26: mod_base = OTHER; note = 2'-deoxy cytidine
  modified_base 28: mod_base = OTHER; note = 2'-deoxy cytidine
  modified_base 30: mod_base = OTHER; note = 2'-deoxy cytidine
  modified_base 32: mod_base = OTHER; note = 2'-deoxy cytidine
  modified_base 34: mod_base = OTHER; note = 2'-deoxy cytidine
  modified_base 36: mod_base = OTHER; note = 2'-deoxy cytidine
  modified_base 38: mod_base = OTHER; note = 2'-deoxy cytidine
  modified_base 40: mod_base = OTHER; note = 2'-deoxy cytidine
acacacacacacacacacacacacacacacacacacacac

SEQ ID NO: 663 - DNA, 40 bp, synthetic construct
  source 1..40: mol_type = other DNA
  modified_base 2: mod_base = OTHER; note = 2'-deoxy 5-methylcytidine
  modified_base 13: mod_base = OTHER; note = 2'-deoxy 5-methylcytidine
  modified_base 17: mod_base = OTHER; note = 2'-deoxy 5-methylcytidine
  modified_base 19: mod_base = OTHER; note = 2'-deoxy 5-methylcytidine
  modified_base 21: mod_base = OTHER; note = 2'-deoxy 5-methylcytidine
  modified_base 23: mod_base = OTHER; note = 2'-deoxy 5-methylcytidine
  modified_base 26: mod_base = OTHER; note = 2'-deoxy 5-methylcytidine
  modified_base 37: mod_base = OTHER; note = 2'-deoxy 5-methylcytidine
gcagaggtgaagcgaacacacacagcagaggtgaagcgaa

SEQ ID NO: 664 - RNA, 40 nt, synthetic construct; identical to SEQ ID NO: 660
  source 1..40: mol_type = other RNA
  modified_base 1: mod_base = OTHER; note = 2'-O-methoxyethyl adenosine
  modified_base 2: mod_base = OTHER; note = 2'-O-methoxyethyl 5-methylcytidine
  modified_base 3: mod_base = OTHER; note = 2'-O-methoxyethyl adenosine
  modified_base 4: mod_base = OTHER; note = 2'-O-methoxyethyl 5-methylcytidine
  modified_base 5: mod_base = OTHER; note = 2'-O-methoxyethyl adenosine
  modified_base 6: mod_base = OTHER; note = 2'-O-methoxyethyl 5-methylcytidine
  modified_base 7: mod_base = OTHER; note = 2'-O-methoxyethyl adenosine
  modified_base 8: mod_base = OTHER; note = 2'-O-methoxyethyl 5-methylcytidine
  modified_base 9: mod_base = OTHER; note = 2'-O-methoxyethyl adenosine
  modified_base 10: mod_base = OTHER; note = 2'-O-methoxyethyl 5-methylcytidine
  modified_base 11: mod_base = OTHER; note = 2'-O-methoxyethyl adenosine
  modified_base 12: mod_base = OTHER; note = 2'-O-methoxyethyl 5-methylcytidine
  modified_base 13: mod_base = OTHER; note = 2'-O-methoxyethyl adenosine
  modified_base 14: mod_base = OTHER; note = 2'-O-methoxyethyl 5-methylcytidine
  modified_base 15: mod_base = OTHER; note = 2'-O-methoxyethyl adenosine
  modified_base 16: mod_base = OTHER; note = 2'-O-methoxyethyl 5-methylcytidine
  modified_base 17: mod_base = OTHER; note = 2'-O-methoxyethyl adenosine
  modified_base 18: mod_base = OTHER; note = 2'-O-methoxyethyl 5-methylcytidine
  modified_base 19: mod_base = OTHER; note = 2'-O-methoxyethyl adenosine
  modified_base 20: mod_base = OTHER; note = 2'-O-methoxyethyl 5-methylcytidine
  modified_base 21: mod_base = OTHER; note = 2'-O-methoxyethyl adenosine
  modified_base 22: mod_base = OTHER; note = 2'-O-methoxyethyl 5-methylcytidine
  modified_base 23: mod_base = OTHER; note = 2'-O-methoxyethyl adenosine
  modified_base 24: mod_base = OTHER; note = 2'-O-methoxyethyl 5-methylcytidine
  modified_base 25: mod_base = OTHER; note = 2'-O-methoxyethyl adenosine
  modified_base 26: mod_base = OTHER; note = 2'-O-methoxyethyl 5-methylcytidine
  modified_base 27: mod_base = OTHER; note = 2'-O-methoxyethyl adenosine
  modified_base 28: mod_base = OTHER; note = 2'-O-methoxyethyl 5-methylcytidine
  modified_base 29: mod_base = OTHER; note = 2'-O-methoxyethyl adenosine
  modified_base 30: mod_base = OTHER; note = 2'-O-methoxyethyl 5-methylcytidine
  modified_base 31: mod_base = OTHER; note = 2'-O-methoxyethyl adenosine
  modified_base 32: mod_base = OTHER; note = 2'-O-methoxyethyl 5-methylcytidine
  modified_base 33: mod_base = OTHER; note = 2'-O-methoxyethyl adenosine
  modified_base 34: mod_base = OTHER; note = 2'-O-methoxyethyl 5-methylcytidine
  modified_base 35: mod_base = OTHER; note = 2'-O-methoxyethyl adenosine
  modified_base 36: mod_base = OTHER; note = 2'-O-methoxyethyl 5-methylcytidine
  modified_base 37: mod_base = OTHER; note = 2'-O-methoxyethyl adenosine
  modified_base 38: mod_base = OTHER; note = 2'-O-methoxyethyl 5-methylcytidine
  modified_base 39: mod_base = OTHER; note = 2'-O-methoxyethyl adenosine
  modified_base 40: mod_base = OTHER; note = 2'-O-methoxyethyl 5-methylcytidine

SEQ ID NO: 665 - RNA, 40 nt, synthetic construct; identical to SEQ ID NO: 660
  source 1..40: mol_type = other RNA
  modified_base 1: mod_base = OTHER; note = Locked nucleic acid with adenine base
  modified_base 2: mod_base = OTHER; note = Locked nucleic acid with 5-methylcytidine base
  modified_base 3: mod_base = OTHER; note = Locked nucleic acid with adenine base
  modified_base 4: mod_base = OTHER; note = Locked nucleic acid with 5-methylcytidine base
  modified_base 5: mod_base = OTHER; note = Locked nucleic acid with adenine base
  modified_base 6: mod_base = OTHER; note = Locked nucleic acid with 5-methylcytidine base
  modified_base 7: mod_base = OTHER; note = Locked nucleic acid with adenine base
  modified_base 8: mod_base = OTHER; note = Locked nucleic acid with 5-methylcytidine base
  modified_base 9: mod_base = OTHER; note = Locked nucleic acid with adenine base
  modified_base 10: mod_base = OTHER; note = Locked nucleic acid with 5-methylcytidine base
  modified_base 11: mod_base = OTHER; note = Locked nucleic acid with adenine base
  modified_base 12: mod_base = OTHER; note = Locked nucleic acid with 5-methylcytidine base
  modified_base 13: mod_base = OTHER; note = Locked nucleic acid with adenine base
  modified_base 14: mod_base = OTHER; note = Locked nucleic acid with 5-methylcytidine base
  modified_base 15: mod_base = OTHER; note = Locked nucleic acid with adenine base
  modified_base 16: mod_base = OTHER; note = Locked nucleic acid with 5-methylcytidine base
  modified_base 17: mod_base = OTHER; note = Locked nucleic acid with adenine base
  modified_base 18: mod_base = OTHER; note = Locked nucleic acid with 5-methylcytidine base
  modified_base 19: mod_base = OTHER; note = Locked nucleic acid with adenine base
  modified_base 20: mod_base = OTHER; note = Locked nucleic acid with 5-methylcytidine base
  modified_base 21: mod_base = OTHER; note = Locked nucleic acid with adenine base
  modified_base 22: mod_base = OTHER; note = Locked nucleic acid with 5-methylcytidine base
  modified_base 23: mod_base = OTHER; note = Locked nucleic acid with adenine base
  modified_base 24: mod_base = OTHER; note = Locked nucleic acid with 5-methylcytidine base
  modified_base 25: mod_base = OTHER; note = Locked nucleic acid with adenine base
  modified_base 26: mod_base = OTHER; note = Locked nucleic acid with 5-methylcytidine base
  modified_base 27: mod_base = OTHER; note = Locked nucleic acid with adenine base
  modified_base 28: mod_base = OTHER; note = Locked nucleic acid with 5-methylcytidine base
  modified_base 29: mod_base = OTHER; note = Locked nucleic acid with adenine base
  modified_base 30: mod_base = OTHER; note = Locked nucleic acid with 5-methylcytidine base
  modified_base 31: mod_base = OTHER; note = Locked nucleic acid with adenine base
  modified_base 32: mod_base = OTHER; note = Locked nucleic acid with 5-methylcytidine base
  modified_base 33: mod_base = OTHER; note = Locked nucleic acid with adenine base
  modified_base 34: mod_base = OTHER; note = Locked nucleic acid with 5-methylcytidine base
  modified_base 35: mod_base = OTHER; note = Locked nucleic acid with adenine base
  modified_base 36: mod_base = OTHER; note = Locked nucleic acid with 5-methylcytidine base
  modified_base 37: mod_base = OTHER; note = Locked nucleic acid with adenine base
  modified_base 38: mod_base = OTHER; note = Locked nucleic acid with 5-methylcytidine base
  modified_base 39: mod_base = OTHER; note = Locked nucleic acid with adenine base
  modified_base 40: mod_base = OTHER; note = Locked nucleic acid with 5-methylcytidine base

SEQ ID NO: 666 - RNA, 40 nt, synthetic construct; identical to SEQ ID NO: 660
  source 1..40: mol_type = other RNA
  modified_base 1: mod_base = OTHER; note = 2'-O-methoxyethyl adenosine
  modified_base 2: mod_base = OTHER; note = Locked nucleic acid with 5-methylcytidine base
  modified_base 3: mod_base = OTHER; note = 2'-O-methoxyethyl adenosine
  modified_base 4: mod_base = OTHER; note = Locked nucleic acid with 5-methylcytidine base
  modified_base 5: mod_base = OTHER; note = 2'-O-methoxyethyl adenosine
  modified_base 6: mod_base = OTHER; note = Locked nucleic acid with 5-methylcytidine base
  modified_base 7: mod_base = OTHER; note = 2'-O-methoxyethyl adenosine
  modified_base 8: mod_base = OTHER; note = Locked nucleic acid with 5-methylcytidine base
  modified_base 9: mod_base = OTHER; note = 2'-O-methoxyethyl adenosine
  modified_base 10: mod_base = OTHER; note = Locked nucleic acid with 5-methylcytidine base
  modified_base 11: mod_base = OTHER; note = 2'-O-methoxyethyl adenosine
  modified_base 12: mod_base = OTHER; note = Locked nucleic acid with 5-methylcytidine base
  modified_base 13: mod_base = OTHER; note = 2'-O-methoxyethyl adenosine
  modified_base 14: mod_base = OTHER; note = Locked nucleic acid with 5-methylcytidine base
  modified_base 15: mod_base = OTHER; note = 2'-O-methoxyethyl adenosine
  modified_base 16: mod_base = OTHER; note = Locked nucleic acid with 5-methylcytidine base
  modified_base 17: mod_base = OTHER; note = 2'-O-methoxyethyl adenosine
  modified_base 18: mod_base = OTHER; note = Locked nucleic acid with 5-methylcytidine base
  modified_base 19: mod_base = OTHER; note = 2'-O-methoxyethyl adenosine
  modified_base 20: mod_base = OTHER; note = Locked nucleic acid with 5-methylcytidine base
  modified_base 21: mod_base = OTHER; note = 2'-O-methoxyethyl adenosine
  modified_base 22: mod_base = OTHER; note = Locked nucleic acid with 5-methylcytidine base
  modified_base 23: mod_base = OTHER; note = 2'-O-methoxyethyl adenosine
  modified_base 24: mod_base = OTHER; note = Locked nucleic acid with 5-methylcytidine base
  modified_base 25: mod_base = OTHER; note = 2'-O-methoxyethyl adenosine
  modified_base 26: mod_base = OTHER; note = Locked nucleic acid with 5-methylcytidine base
  modified_base 27: mod_base = OTHER; note = 2'-O-methoxyethyl adenosine
  modified_base 28: mod_base = OTHER; note = Locked nucleic acid with 5-methylcytidine base
  modified_base 29: mod_base = OTHER; note = 2'-O-methoxyethyl adenosine
  modified_base 30: mod_base = OTHER; note = Locked nucleic acid with 5-methylcytidine base
  modified_base 31: mod_base = OTHER; note = 2'-O-methoxyethyl adenosine
  modified_base 32: mod_base = OTHER; note = Locked nucleic acid with 5-methylcytidine base
  modified_base 33: mod_base = OTHER; note = 2'-O-methoxyethyl adenosine
  modified_base 34: mod_base = OTHER; note = Locked nucleic acid with 5-methylcytidine base
  modified_base 35: mod_base = OTHER; note = 2'-O-methoxyethyl adenosine
  modified_base 36: mod_base = OTHER; note = Locked nucleic acid with 5-methylcytidine base
  modified_base 37: mod_base = OTHER; note = 2'-O-methoxyethyl adenosine
  modified_base 38: mod_base = OTHER; note = Locked nucleic acid with 5-methylcytidine base
  modified_base 39: mod_base = OTHER; note = 2'-O-methoxyethyl adenosine
  modified_base 40: mod_base = OTHER; note = Locked nucleic acid with 5-methylcytidine base

SEQ ID NO: 667 - DNA, 3221 bp, Hepatitis B virus
  source 1..3221: mol_type = genomic DNA
ttccactgccttccaccaagcactgcaggatcccagagtcaggggtccgtattttcctgctggtggctccagttcaggaacagtaaaccctgctccgaatattgcctctcacatctcgtcaatctccgcgaggactggggaccctgtgacgaacatggagaacatcacatcaggactcctaggacccctgctcgtgttacaggcggggtttttcttgttgacaagaatcctcacaataccgcagagtctaggctcgtggtggacttctctcaattttctagggggatcacccgtgtgtcttggccaaaattcgcagtccccaacctccaatcactcaccaacctcctgtcctccaatttgtcctggttatcgttggatgtgtctgcggcgttttatcatattcctcttcatcctgctgctatgcctcatcttcttattggttcttctggattatcaaggtatgttgcccgtttgtcctctaattccaggatcaacaacaaccggtacgggaccatgcaaaacctgcacgactcctgctcaaggcaactctatgtttccctcatgttgctgtacaaaacctacggacggaaattgcacctgtattcccatcccatcgtcctgggctttcgcaaaatacctatgggagtgggcctcagtccgtttctcttggctcagtttactagtgccatttgttcagtggttcgtagggctttcccccactgtttggctttcagctatatggatgatgtggtattgggggccaagactgtacagcatcgtgagtccctttataccgctgttaccaattttcttttgtctctgggtatacatttaaaccctaacaaaacaaaaagatggggttattccctaaacttcatgggttacataattggaagttggggaactttgccacaggatcatattgtacaaaagatcaaacactgttttagaaaacttcctgttaacaggcctattgattggaaagtatgtcaaagaattgtgggtcttttgggctttgctgctccatttacacaatgtggatatcctgccttaatgcctttgtatgcatgtatacaagctaaacaggctttcactttctcgccaacttacaaggcctttctaagtaaacagtacatgaacctttaccccgttgctcggcaacggcctggtctgtgccaagtgtttgctgacgcaacccccactggctggggcttggccataggccatcagcgcatgcgtggaacctttgtggctcctctgccgatccatactgcggaactcctagccgcttgttttgctcgcagccggtctggagcaaagctcatcggaactgacaattctgtcgtcctctcgcggaaatatacatcgtttccatggctgctaggctgtactgccaactggatccttcgcgggacgtcctttgtttacgtcccgtcggcgctgaatcccgcggacgacccctctcggggccgcttgggactctatcgtccccttctccgtctgccgttccagccgaccacggggcgcacctctctttacgcggtctccccgtctgtgccttctcatctgccggtccgtgtgcacttcgcttcacctctgcacgttgcatggagaccaccgtgaacgcccatcagatcctgcccaaggtcttacataagaggactcttggactcccagcaatgtcaacgaccgaccttgaggcctacttcaaagactgtgtgtttaaggactgggaggagctgggggaggagagtaggttaatgatctttgtattaggaggctgtaggcataaattggtctgcgcaccagcaccatgcaactttttcacctctgccaaatcatctcttgtacatgtcccactgttcaagcctccaagctgtgccttgggtggctttggggcatggacattgacccttataaagaatttggagctactgttgagttactctcgtttttgccttctgacttctttccttccgtcagagatcttctagacaccgcctcagctctgtatcgagaagccttagagtctcctgagcactgctcacctcaccatactgcactcaggcaagccattctctgctggggggaattgatgactctagctacctgggtgggtaataatttggatgatccagcatccagggatctagtagtcaattatgttaatactaacatgggtttaaagatcaggcaactattgtggtttcatatatcttgccttacttttggaagagagactgtacttgaatatttggtctctttcggagtgtggattcgcactcctccaccctatagaccaccaaatgcccctatcttatcaacacttccggaaactactgttattagacgacgggaccgaggcaggtcccctagaagaagaactccctcgcctcgcagacgcagatctcaatcgccgcgtcgcagaagatctcaatctcgggaatctcaatgttagtattccttggactcataaggtgggaaactttacggggctttattcctctacagtacctatctttaatcctgaatggcaaactccttcctttcctaagattcatttacaagaggacattattaataggtgtcaacaatttgtgggccctctcactgtaaatgaaaagagaagattgaaattaattatgcctgctagattctatcctacccacactaaatatttgcccttagacaaaggaattaaaccttattatccagatcaggtagttaatcattacttccaaaccagacattatttacatactctttggaaggcgggtattctatataagagggaaaccacacgtagcgcatcattttgcgggtcaccatattcttgggaacaagagctacagcatgggaggttggtcatcaaaacctcgcaaaggcatggggacgaatctttctgttcccaaccctctgggattctttcccgatcatcagttggaccctgcattcggagccaactcaaacaatccagattgggacttcaaccccatcaaggaccactggccagcagccaaccaggtgggagtgggggcattcgggccagggctcacccctccacacggcggtatcttggggtggagccctcaggctcagggcatattgaccacagtgtcaacaattcctcctcctgcctccaccaatcggcagtcaggaaggcagcctactcccatctctccacctctccgagacagtcatcctcaggccacgcagtggaa

SEQ ID NO: 668 - DNA, 3215 bp, Hepatitis B virus
  source 1..3215: mol_type = genomic DNA
ctccaccactttccaccaaactcttcaagatcccggagtcagggccctgtactttcctgctggtggctccagttcaggaacagtgagccctgctcagaatactgtctctgccatatcgtcaatcttatcgaagactggggaccctgtaccgaacatggagaacatcgcatcaggactcctaggacccctgctcgtgttacaggcggggtttttcttgttgacaaaaatcctcacaataccacagagtctagactcgtggtggacttctctcaattttctagggggaacacccgtgtgtcttggccaaaattcgcagtcccaaatctccagtcactcaccaacctgttgtcctccaatttgtcctggttatcgctggatgtgtctgcggcgttttatcatcttcctctgcatcctgctgctatgcctcatcttcttgttggttcttctggactatcaaggtatgttgcccgtttgtcctctaattccaggatcatcaacaaccagcaccggaccatgcaaaacctgcacaactcctgctcaaggaacctctatgtttccctcatgttgctgtacaaaacctacggatggaaactgcacctgtattcccatcccatcatcttgggctttcgcaaaatacctatgggagtgggcctcagtccgtttctcttggctcagtttactagtgccatttgttcagtggttcgtagggctttcccccactgtctggctttcagttatatggatgatatggttttgggggccaagtctgtacaacatcttgagtccctttatgccgctgttaccaattttcttttgtctttgggtatacatttaaaccctcacaaaacaaaaagatggggatattcccttaacttcatgggatatgtaattgggagctggggcacattgccacaggaacatattgtacaaaaaatcaaaatgtggtttaggaaacttcctgtaaacaggcctattgattggaaagtatgtcaacgaattgtgggtcttttggggtttgccgcccctttcacgcaatgtggatatcctgctttaatgcctttatatgcatgtatacaagcaaaacaggcttttactttctcgccaacttacaaggcctttctaactaaacagtatctgaacctttaccccgttgctcggcaacggccaggtctgtgccaagtgtttgctgacgcaacccccactggttggggcttggccataggccatcagcgcatgcgtggaacctttgtgtctcctctgccgatccatactgcggaactcctagccgcttgttttgctcgcagccggtctggggcaaaactcatcgggactgacaattctgtcgtgctctcccgcaagtatacatcatttccatggctgctaggctgtgctgccaactggatcctgcgcgggacgtcctttgtttacgtcccgtcggcgctgaatcccgcggacgacccttcccggggccgcttggggctctaccgcccgcttctccgcctgttgtaccgaccgaccacggggcgcacctctctttacgcggactccccgtctgtgccttctcatctgccggaccgtgtgcacttcgcttcacctctgcacgtcgcatggagaccaccgtgaacgcccacgggaacctgcccaaggtcttgcataagaggactcttggactttcagcaatgtcaacgaccgaccttgaggcatacttcaaagactgtgtgtttaatgagtgggaggagttgggggaggaggttaggttaaaggtctttgtactaggaggctgtaggcataaattggtgtgttcaccagcaccatgcaactttttcacctctgcctaatcatctcatgttcatgtcctactgttcaagcctccaagctgtgccttgggtggctttggggcatggacattgacccgtataaagaatttggagcttctgtggagttactctcttttttgccttctgacttctttccgtcggtgcgagatctcctcgacaccgcctctgctttgtatcgggaggccttagagtctccggaacattgttcacctcaccatacggcactcaggcaagctattctgtgttggggtgagttaatgaatctagccacctgggtgggaagtaatttggaagatccggcatccagggaattagtagtcagctatgtcaacgttaatatgggcctaaaaatcagacaactattgtggtttcacatttcctgtcttacttttgggagagaaactgttcttgaatatttggtgtcttttggagtgtggattcgcactcctcctgcatatagaccaccaaatgcccctatcttatcaacacttccggaaactactgttgttagacgaagaggcaggtcccctagaagaagaactccctcgcctcgcagacgaaggtctcaatcgccgcgtcgcagaagatctcaatctcgggaatctcaatgttagtattccttggacacataaggtgggaaactttacggggctttattcttctacggtaccttgctttaatcctaaatggcaaactccttcttttcctgacattcatttgcaggaggacattgttgatagatgtaagcaatttgtggggccccttacagtaaatgaaaacaggagactaaaattaattatgcccgctaggttttatcccaatgttactaaatatttgcccttagataaagggatcaaaccgtattatccagagtatgtagttaatcattacttccagacgcgacattatttacacactctttggaaggcggggatcttatataaaagagagtccacacgtagcgcctcattttgcgggtcaccatattcttgggaacaagatctacagcatgggaggttggtcttccaaacctcgaaaaggcatggggacaaatctttctgtccccaatcctctgggattcttccccgatcatcagttggaccctgcattcaaagccaactcagaaaatccagattgggacctcaacccgaacaaggacaactggccggacgccaacaaggtgggagtgggagcattcgggccagggttcacccctccccatgggggactgttggggtggagccctcaggctcagggcctactcacaactgtgccagcagctcctcctcctgcctccaccaatcggcagtcaggaaggcagcctactcccttatccccacctctaagggacactcatcctcaggccatgcagtggaa

SEQ ID NO: 669 - DNA, 3215 bp, Hepatitis B virus
  source 1..3215: mol_type = genomic DNA
ctccaccacattccaccaagctctgctagatcccagagtgaggggcctatattttcctgctggtggctccagttccggaacagtaaaccctgttccgactactgcctcacccatatcgtcaatcttctcgaggactggggaccctgcacagaacatggagaacacaacatcaggattcctaggacccctgctcgtgttacaggcggggtttttcttgttgacaaaaatcctcacaataccacagagtctagactcgtggtggacttctctcaattttctagggggagcacccacgtgtcctggccaaaattcgcagtccccaacctccaatcactcaccaacctcttgtcctccaatttgtcctggctatcgctggatgtgtctgcggcgttttatcatattcctcttcatcctgctgctatgcctcatcttcttgttggttcttctggactaccaaggtatgttgcccgtttgtcctctacttccaggaacaacaactaccagcacgggaccatgcaagacctgcacgattcctgctcaaggaacctctatgtttccctcttgttgctgtacaaaaccttcggacggaaactgcacttgtattcccatcccatcatcctgggctttcgcaagattcctatgggagtgggcctcagtccgtttctcctggctcagtttactagtgccatttgttcagtggttcgtagggctttcccccactgtttggctttcagttatatggatgatgtggtattgggggccaagtctgtacaacatcttgagtccctttttacctctattaccaattttcttttgtctttgggtatacatttgaatcctaataaaaccaaacgttggggctactcccttaacttcatgggatatgtaattggaagttggggtactttaccacaggaacatattgtacggaaactcaagcaatgttttcgaaaactgcctgtaaatagacctattgattggaaagtatgtcaaagaattgtgggtcttttgggctttgctgccccttttacacaatgtggctatcctgccttgatgcctttatatgcatgtatacactctaagcaggctttcactttctcgccaacttacaaggcctttctgtgtaaacaatatctgcacctttaccccgttgcccggcaacggtcaggtctctgccaagtgtttgctgacgcaacccccactggatggggcttggccataggccatcggcgcatgcgcggaacctttgtggctcctctgccgatccatactgcggaactcctagcagcttgttttgctcgcagccggtctggagcaaaacttatcgggactgacaactctgttgtcctctctcggaaatacacctccttcccatggctgctcgggtgtgctgccaactggatccttcgcgggacgtcctttgtctacgtcccgtcggcgctgaatcccgcggacgacccgtctcggggccgtttggggctctatcgtccccttcttcatctgccgttccggccgaccacggggcgcacctctctttacgcggtctccccgtctgtgccttctcatctgccggaccgtgtgcacttcgcttcacctctgcacgtcgcatggagaccaccgtgaacgcccaccaggtcttgcccaaggtcttacataagaggactcttggactctcatcaatgtcaacgaccgaccttgaggcatacttcaaagactgtttgtttaaggactgggaggagttgggggaggagattaggttaaaggtctttgtactaggaggctgtaggcataaattggtctgttcaccagcaccatgcaactttttcacctctgcctaatcatctcatgttcatgtcctactgttcaagcctccaagctgtgccttgggtggctttggggcatggacattgacccgtataaagaatttggagcttctgtggagttactctcttttttgccttctgacttctttccttctattcgagatctcctcgacaccgcctctgctctgtatcgggaggccttagagtctccggaacattgttcacctcaccatacagcactcaggcaagctattctgtgttggggtgagttgatgaatctggccacctgggtgggaagtaatttggaagacccagcatccagggaattagtagtcagctatgtcaatgttaatatgggcctaaaaatcagacaactattgtggtttcacatttcctgtcttacttttggaagagaaactgttcttgagtatttggtatcttttggagtgtggattcgcactcctccagcttacagaccaccaaatgcccctatcttatcaacacttccggaaactactgttgttagacgacgaggcaggtcccctagaagaagaactccctcgcctcgcagacgaaggtctcaatcgccgcgtcgcagaagatctcaatctcgggaatctcaatgttagtatcccttggactcataaggtgggaaactttactgggctttattcttctactgtacctgtctttaatcctgagtggcaaactccctcctttcctaacattcatttacaggaggacattattaatagatgtgaacaatatgtgggccctcttacaactaatgaaaaaaggagattaaaattaattatgcctgctaggttttatcctaaccttaccaaatacttgcccttggataaaggcattaaaccttattatcctgaacatgcagttaatcattacttcaaaactaggcattatttacatactctgtggaaggccggcattctatataagagagaaactacacgcagcgcttcattttgtgggtcaccatattcttgggaacaagagctacagcatgggaggttggtcttccaaacctcgacaaggcatggggacgaatctttctgttcccaatcctctgggattttttcccgatcaccagttggaccctgcgttcggagccaactcaaacaatccagattgggacttcaaccccaacaaggatcactggccagaggcaaatcaggtaggagcgggagcattcgggccagggttcaccccaccacacggcggtcttttggggtggagccctcaggctcagggcatattgaccacagtgccagcagcgcctcctcctgcctccaccaatcggcagtcaggaagacagcctactcccatctctccacctctaagagacagtcatcctcaggccatgcagtggaa

SEQ ID NO: 670 - DNA, 10123 bp, Hepatitis B virus
  source 1..10123: mol_type = genomic DNA
aaaaacctcccacacctccccctgaacctgaaacataaaatgaatgcaattgttgttgttaacttgtttattgcagcttataatggttacaaataaagcaatagcatcacaaatttcacaaataaagcatttttttcactgcattctagttgtggtttgtccaaactcatcaatgtatcttatcatgtctggatctgggccactccctctctgcgcgctcgctcgctcactgaggccgcccgggctttgcccgggcggcctcagtgagcgagcgagcgcgcagagagggagtggccaactccatcactaggggttcctctgctcgatgtattcaatctaagcaggctttcactttctcgccaacttacaaggcctttctgtgtaaacaatacctgaacctttaccccgttgcccggcaacggccaggtctgtgccaagtgtttgctgacgcaacccccactggctggggcttggtcatgggccatcagcgcgtgcgtggaaccttttcggctcctctgccgatccatactgcggaactcctagccgcttgttttgctcgcagcaggtctggagcaaacattatcgggactgataactctgttgtcctctcccgcaaatatacatcgtatccatggctgctaggctgtgctgccaactggatcctgcgcgggacgtcctttgtttacgtcccgtcggcgctgaatcctgcggacgacccttctcggggtcgcttgggactctctcgtccccttctccgtctgccgttccgaccgaccacggggcgcacctctctttacgcggactccccgtctgtgccttctcatctgccggaccgtgtgcacttcgcttcacctctgcacgtcgcatggagaccaccgtgaacgcccaccgaatgttgcccaaggtcttacataagaggactcttggactctctgcaatgtcaacgaccgaccttgaggcatacttcaaagactgtttgtttaaagactgggaggagttgggggaggagattagattaaaggtctttgtactaggaggctgtaggcataaattggtctgcgcaccagcaccatgcaactttttcacctctgcctaatcatctcttgttcatgtcctactgttcaagcctccaagctgtgccttgggtggctttggggcatggacatcgacccttataaagaatttggagctactgtggagttactctcgtttttgccttctgacttctttccttcagtacgagatcttctagataccgcctcagctctgtatcgggaagccttagagtctcctgagcattgttcacctcaccatactgcactcaggcaagcaattctttgctggggggaactaatgactctagctacctgggtgggtgttaatttggaagatccagcatctagagacctagtagtcagttatgtcaacactaatatgggcctaaagttcaggcaactcttgtggtttcacatttcttgtctcacttttggaagagaaaccgttatagagtatttggtgtctttcggagtgtggattcgcactcctccagcttatagaccaccaaatgcccctatcctatcaacacttccggaaactactgttgttagacgacgaggcaggtcccctagaagaagaactccctcgcctcgcagacgaaggtctcaatcgccgcgtcgcagaagatctcaatctcgggaacctcaatgttagtattccttggactcataaggtggggaactttactggtctttattcttctactgtacctgtctttaatcctcattggaaaacaccatcttttcctaatatacatttacaccaagacattatcaaaaaatgtgaacagtttgtaggcccacttacagttaatgagaaaagaagattgcaattgattatgcctgctaggttttatccaaaggttaccaaatatttaccattggataagggtattaaaccttattatccagaacatctagttaatcattacttccaaactagacactatttacacactctatggaaggcgggtatattatataagagagaaacaacacatagcgcctcattttgtgggtcaccatattcttgggaacaagatctacagcatggggcagaatctttccaccagcaatcctctgggattctttcccgaccaccagttggatccagccttcagagcaaacacagcaaatccagattgggacttcaatcccaacaaggacacctggccagacgccaacaaggtaggagctggagcattcgggctgggtttcaccccaccgcacggaggccttttggggtggagccctcaggctcagggcatactacaaactttgccagcaaatccgcctcctgcctccaccaatcgccagacaggaaggcagcctaccccgctgtctccacctttgagaaacactcatcctcaggccatgcagtggaattccacaacctttcaccaaactctgcaagatcccagagtgagaggcctgtatttccctgctggtggctccagttcaggagcagtaaaccctgttccgactactgcctctcccttatcgtcaatcttctcgaggattggggaccctgcgctgaacatggagaacatcacatcaggattcctaggaccccttctcgtgttacaggcggggtttttcttgttgacaagaatcctcacaataccgcagagtctagactcgtggtggacttctctcaattttctagggggaactaccgtgtgtcttggccaaaattcgcagtccccaacctccaatcactcaccaacctcctgtcctccaacttgtcctggttatcgctggatgtgtctgcggcgttttatcatcttcctcttcatcctgctgctatgcctcatcttcttgttggttcttctggactatcaaggtatgttgcccgtttgtcctctaattccaggatcctcaaccaccagcacgggaccatgccgaacctgcatgactactgctcaaggaacctctatgtatccctcctgttgctgtaccaaaccttcggacggaaattgcacctgtattcccatcccatcatcctgggctttcggaaaattcctatgggagtgggcctcagcccgtttctcctggctcagtttactagtgccatttgttcagtggttcgtagggctttcccccactgtttggctttcagttatatggatgatgtggtattgggggccaagtctgtacagcatcttgagtccctttttaccgctgttaccaattttcttttgtctttgggtatacatttaaaccctaacaaaacaaagagatggggttactctctgaattttatgggttatgtcattggaagttatgggtccttgccacaagaacacatcatacaaaaaatcaaagaatgttttagaaaacttcctattaacaggcctattgattggaaagtatgtcaacgaattgtgggtcttttgggttttgctgccccatttacacaatgtggttatcctgcgttaatgcccttgtatgcatgtattcaatctaagcaggctttcactttctcgccaacttacaaggcctttctgtgtaaacaatacctgaacctttaccccgttgcccggcaacggccaggtctgtgccaagtgtttgctgacgcaacccccactggctggggcttggtcatgggccatcagcgcgtgcgtggaaccttttcggctcctctgccgatccatactgcggaactcctagccgcttgttttgctcgcagcaggtctggagcaaacattatcgggactgataactctgttgtcctctcccgcaaatatacatcgtatccatggctgctaggctgtgctgccaactggatcctgcgcgggacgtcctttgtttacgtcccgtcggcgctgaatcctgcggacgacccttctcggggtcgcttgggactctctcgtccccttctccgtctgccgttccgaccgaccacggggcgcacctctctttacgcggactccccgtctgtgccttctcatctgccggaccgtgtgcacttcgcttcacctctgcacgtcgcatggagaccaccgtgaacgcccaccgaatgttgcccaaggtcttacataagaggactcttggactctctgcaatgtcaacgaccgaccttgaggcatacttcaaagactgtttgtttaaagactgggaggagttgggggaggagattagattaaaggtctttgtactaggaggctgtaggcataaattggtctgcgcaccagcaccatgcaactttttcacctctgcctaatcatctcttgttcatgtcctactgttcaagcctccaagctgtgccttgggtggctttggggcatggacatcgacccttataaagaatttggagctactgtggagttactctcgtttttgccttctgacttctttccttcagtacgagatcccctaactacaaggaacccctagtgatggagttggccactccctctctgcgcgctcgctcgctcactgaggccgggcgaccaaaggtcgcccgacgcccgggctttgcccgggcggcctcagtgagcgagcgagcgcgcagagagggacagatccccaggaagctcctctgtgtcctcataaaccctaacctcctctacttgagaggacattccaatcataggctgcccatccaccctctgtgtcctcctgttaattaggtcacttaacaaaaaggaaattgggtaggggtttttcacagaccgctttctaagggtaattttaaaatatctgggaagtcccttccactgctgtgttccagaagtgttggtaaacagcccacaaatgtcaacagcagaaacatacaagctgtcagctttgcacaagggcccaacaccctgctcatcaagaagcactgtggttgctgtgttagtaatgtgcaaaacaggaggcacattttccccacctgtgtaggttccaaaatatctagtgttttcatttttacttggatcaggaacccagcactccactggataagcattatccttatccaaaacagccttgtggtcagtgttcatctgctgactgtcaactgtagcattttttggggttacagtttgagcaggatatttggtcctgtagtttgctaacacaccctgcagctccaaaggttccccaccaacagcaaaaaaatgaaaatttgacccttgaatgggttttccagcaccattttcatgagttttttgtgtccctgaatgcaagtttaacatagcagttaccccaataacctcagttttaacagtaacagcttcccacatcaaaatatttccacaggttaagtcctcatttaaattaggcaaaggaattaattcttgaagacgaaagggcctcgtgatacgcctatttttataggttaatgtcatgataataatggtttcttagacgtcaggtggcacttttcggggaaatgtgcgcggaacccctatttgtttatttttctaaatacattcaaatatgtatccgctcatgagacaataaccctgataaatgcttcaataatattgaaaaaggaagagtatgagtattcaacatttccgtgtcgcccttattcccttttttgcggcattttgccttcctgtttttgctcacccagaaacgctggtgaaagtaaaagatgctgaagatcagttgggtgcacgagtgggttacatcgaactggatctcaacagcggtaagatccttgagagttttcgccccgaagaacgttttccaatgatgagcacttttaaagttctgctatgtggcgcggtattatcccgtgttgacgccgggcaagagcaactcggtcgccgcatacactattctcagaatgacttggttgagtactcaccagtcacagaaaagcatcttacggatggcatgacagtaagagaattatgcagtgctgccataaccatgagtgataacactgcggccaacttacttctgacaacgatcggaggaccgaaggagctaaccgcttttttgcacaacatgggggatcatgtaactcgccttgatcgttgggaaccggagctgaatgaagccataccaaacgacgagcgtgacaccacgatgcctgcagcaatggcaacaacgttgcgcaaactattaactggcgaactacttactctagcttcccggcaacaattaatagactggatggaggcggataaagttgcaggaccacttctgcgctcggcccttccggctggctggtttattgctgataaatctggagccggtgagcgtgggtctcgcggtatcattgcagcactggggccagatggtaagccctcccgtatcgtagttatctacacgacggggagtcaggcaactatggatgaacgaaatagacagatcgctgagataggtgcctcactgattaagcattggtaactgtcagaccaagtttactcatatatactttagattgatttaaaacttcatttttaatttaaaaggatctaggtgaagatcctttttgataatctcatgaccaaaatcccttaacgtgagttttcgttccactgagcgtcagaccccgtagaaaagatcaaaggatcttcttgagatcctttttttctgcgcgtaatctgctgcttgcaaacaaaaaaaccaccgctaccagcggtggtttgtttgccggatcaagagctaccaactctttttccgaaggtaactggcttcagcagagcgcagataccaaatactgtccttctagtgtagccgtagttaggccaccacttcaagaactctgtagcaccgcctacatacctcgctctgctaatcctgttaccagtggctgctgccagtggcgataagtcgtgtcttaccgggttggactcaagacgatagttaccggataaggcgcagcggtcgggctgaacggggggttcgtgcacacagcccagcttggagcgaacgacctacaccgaactgagatacctacagcgtgagctatgagaaagcgccacgcttcccgaagggagaaaggcggacaggtatccggtaagcggcagggtcggaacaggagagcgcacgagggagcttccagggggaaacgcctggtatctttatagtcctgtcgggtttcgccacctctgacttgagcgtcgatttttgtgatgctcgtcaggggggcggagcctatggaaaaacgccagcaacgcggcctttttacggttcctggccttttgctggccttttgctcacatgttctttcctgcgttatcccctgattctgtggataaccgtattaccgcctttgagtgagctgataccgctcgccgcagccgaacgaccgagcgcagcgagtcagtgagcgaggaagcggaagagcgcctgatgcggtattttctccttacgcatctgtgcggtatttcacaccgcatatggtgcactctcagtacaatctgctctgatgccgcatagttaagccagtatacactccgctatcgctacgtgactgggtcatggctgcgccccgacacccgccaacacccgctgacgcgccctgacgggcttgtctgctcccggcatccgcttacagacaagctgtgaccgtctccgggagctgcatgtgtcagaggttttcaccgtcatcaccgaaacgcgcgaggcagctgtggaatgtgtgtcagttagggtgtggaaagtccccaggctccccagcaggcagaagtatgcaaagcatgcatctcaattagtcagcaaccaggtgtggaaagtccccaggctccccagcaggcagaagtatgcaaagcatgcatctcaattagtcagcaaccatagtcccgcccctaactccgcccatcccgcccctaactccgcccagttccgcccattctccgccccatggctgactaattttttttatttatgcagaggccgaggccgcctcggcctctgagctattccagaagtagtgaggaggcttttttggaggcctaggcttttgcaaaaagcttcacgctgccgcaagcactcagggcgcaagggctgctaaaggaagcggaacacgtagaaagccagtccgcagaaacggtgctgaccccggatgaatgtcagctactgggctatctggacaagggaaaacgcaagcgcaaagagaaagcaggtagcttgcagtgggcttacatggcgatagctagactgggcggttttatggacagcaagcgaaccggaattgccagctggggcgccctctggtaaggttgggaagccctgcaaagtaaactggatggctttcttgccgccaaggatctgatggcgcaggggatcaagatcgatctgatcaagagacaggatgaggatcgtttcgcatgattgaacaagatggattgcacgcaggttctccggccgcttgggtggagaggctattcggctatgactgggcacaacagacaatcggctgctctgatgccgccgtgttccggctgtcagcgcaggggcgcccggttctttttgtcaagaccgacctgtccggtgccctgaatgaactgcaggacgaggcagcgcggctatcgtggctggccacgacgggcgttccttgcgcagctgtgctcgacgttgtcactgaagcgggaagggactggctgctattgggcgaagtgccggggcaggatctcctgtcatctcaccttgctcctgccgagaaagtatccatcatggctgatgcaatgcggcggctgcatacgcttgatccggctacctgcccattcgaccaccaagcgaaacatcgcatcgagcgagcacgtactcggatggaagccggtcttgtcgatcaggatgatctggacgaagagcatcaggggctcgcgccagccgaactgttcgccaggctcaaggcgcgcatgcccgacggcgaggatctcgtcgtgacccatggcgatgcctgcttgccgaatatcatggtggaaaatggccgcttttctggattcatcgactgtggccggctgggtgtggcggaccgctatcaggacatagcgttggctacccgtgatattgctgaagagcttggcggcgaatgggctgaccgcttcctcgtgctttacggtatcgccgctcccgattcgcagcgcatcgccttctatcgccttcttgacgagttcttctgagcgggactctggggttcgaaatgaccgaccaagcgacgcccaacctgccatcacgagatttcgattccaccgccgccttctatgaaaggttgggcttcggaatcgttttccgggacgccggctggatgatcctccagcgcggggatctcatgctggagttcttcgcccaccccgggctcgatcccctcgcgagttggttcagctgctgcctgaggctggacgacctcgcggagttctaccggcagtgcaaatccgtcggcatccaggaaaccagcagcggctatccgcgcatccatgcccccgaactgcaggagtggggaggcacgatggccgctttggtccggatctttgtgaaggaaccttacttctgtggtgtgacataattggacaaactacctacagagatttaaagctctaaggtaaatataaaatttttaagtgtataatgtgttaaactactgattctaattgtttgtgtattttagattccaacctatggaactgatgaatgggagcagtggtggaatgcctttaatgaggaaaacctgttttgctcagaagaaatgccatctagtgatgatgaggctactgctgactctcaacattctactcctccaaaaaagaagagaaaggtagaagaccccaaggactttccttcagaattgctaagttttttgagtcatgctgtgtttagtaatagaactcttgcttgctttgctatttacaccacaaaggaaaaagctgcactgctatacaagaaaattatggaaaaatattctgtaacctttataagtaggcataacagttataatcataacatactgttttttcttactccacacaggcatagagtgtctgctattaataactatgctcaaaaattgtgtacctttagctttttaatttgtaaaggggttaataaggaatatttgatgtatagtgccttgactagagatcataatcagccataccacatttgtagaggttttacttgcttta

SEQ ID NO: 671 - DNA, 3212 bp, Hepatitis B virus
  source 1..3212: mol_type = genomic DNA
ttccacaacattccaccaagctctgcaggatcccagagtaagaggcctgtattttcctgctggtggctccagttccggaacagtgaaccctgttccgactactgcctcactcatctcgtcaatcttctcgaggattggggaccctgcaccgaacatggaaagcatcacatcaggattcctaggacccctgctcgtgttacaggcggggtttttcttgttgacaaaaatcctcacaataccgcagagtctagactcgtggtggacttctctcaattttctagggggagctcccgtgtgtcttggccaaaattcgcagtccccaacctccaatcactcaccaacctcttgtcctccaatttgtcctggctatcgctggatgtgtctgcggcgttttatcatcttcctcttcatcctgctgctatgcctcatcttcttgttggttcttctggactatcaaggtatgttgcccgtttgtcctctaattccaggatcatcaaccaccagtacgggaccctgccgaacctgcacgactcttgctcaaggaacctctatgtttccctcatgttgctgttcaaaaccttcggacggaaattgcacttgtattcccatcccatcatcatgggctttcggaaaattcctatgggagtgggcctcagcccgtttctcctggctcagtttactagtgccatttgttcagtggttcgccgggctttcccccactgtctggctttcagttatatggatgatgtggtattgggggccaagtctgtacaacatcttgagtccctttatacctctgttaccaattttcttttgtctttgggtatacatttaaatcccaacaaaacaaaaagatggggatattccctaaatttcatgggttatgtaattggaagttgggggtcattaccacaggaacacatcagaatgaaaatcaaagactgttttagaaaactccctgttaaccggcctattgattggaaagtatgtcaaagaattgtgggtcttttgggctttgctgccccttttacacaatgtggatatcctgctttaatgcctctgtatgcgtgtattcaatctaagcaggctttcactttctcgccaacttacaaggcctttctgtgtaaacaatacctgaacctttaccccgttgcccggcaacggccaggtctgtgccaagtgtttgctgatgcaacccccactggctggggcttggccataggccatcagcgcatgcgtggaacctttgtggctcctctgccgatccatactgcggaactcctagccgcttgttttgctcgcagcaggtctggagcgaaacttatcgggacagataattctgtcgttctctcccggaaatatacatcatttccatggctgctaggctgtgctgccaactggatcctgcgagggacgtcctttgtctacgtcccgtcagcgctgaatcctgcggacgacccgtctcggggtcgcttggggatctatcgtccccttctccgtctgccgttccagccgaccacggggcgcacctctctttacgcggtctccccgtctgtgccttctcatctgccggaccgtgtgcacttcgcttcacctctgcacgtcgcatggagaccaccgtgaacgcccaccaaatcttgcccaaggtcttacataagaggactcttggactctctgcaatgtcaacgaccgaccttgaggcatacttcaaagactgtttgtttaaagactgggaggagttgggggaggagattagattaaaggtctttgtactaggaggctgtaggcataaattggtctgcgcaccagcaccatgcaactttttcacctctgcctaatcatctcttgttcatgtcctactgttcaagcctccaagctgtgccttgggtggctttggggcatggacattgacccttataaagaatttggagctactgtggagttactctcgtttttgccttctgacttctttccttcagtaagagatcttctagataccgcctcagctctgtatcgggatgccttagaatctcctgagcattgttcacctcaccacactgcactcaggcaagccattctttgctggggggaactaatgactctagctacctgggtgggtgtaaatttggaagatccagcatccagggacctagtagtcagttatgtcaatactaatatgggcctaaagttcaggcaattattgtggtttcacatttcttgtctcacttttggaagagaaaccgtcatagagtatttggtgtcttttggagtgtggattcgcactcctccagcttatagaccaccaaatgcccctatcttatcaacacttccggagaatactgttgttagacgaagaggcaggtcccctagaagaagaactccctcgcctcgcagacgaagatctcaatcgccgcgtcgcagaagatctcaatctccagcttcccaatgttagtattccttggactcacaaggtgggaaattttacggggctttactcttctactatacctgtctttaatcctaactggaaaactccatcttttcctgatattcatttgcaccaggacattattaacaaatgtgaacaatttgtaggtcctctaacagtaaatgaaaaacgaagattaaacttagtcatgcctgctagattttttcccatctctacgaaatatttgcccctagagaaaggtataaaaccttattatccagataatgtagttaatcattacttccaaaccagacactatttacataccctatggaaggcgggcatcttatataaaagagaaactacacgtagcgcctcattttgtgggtcaccttattcttgggaacaagagctacatcatggggctttcttggacggtccctctcgaatgggggaagaatcattccaccaccaatcctctgggattttttcccgaccaccagttggatccagcattcagagcaaacaccagaaatccagattgggaccacaatcccaacaaagaccactggacagaagccaacaaggtaggagtgggagcattcgggccggggttcactcccccacacggaggccttttggggtggagccctcaggctcaaggcatgctaaaaacattgccagcagatccgcctcctgcctccaccaatcggcagtcaggaaggcagcctaccccaatcactccacctttgagagacactcatcctcaggccatgcagtggaa

SEQ ID NO: 672 - DNA, 3215 bp, Hepatitis B virus
  source 1..3215: mol_type = genomic DNA
ctcaactcagttccaccaggctctgttggatccgagggtaagggctctgtattttcctgctggtggctccagttcagggacacagaaccctgctccgactattgcctctctcacatcatcaatcttctcgaagactgggggccctgccatgaacatggagaacatcacatcaggactcctaggacccctgctcgtgttacaggcggtgtgtttcttgttgacaaaaatcctcacaataccacagagtctagactcgtggtggacttctctcaattttctagggggactacccgggtgtcctggccaaaattcgcagtccccaacctccaatcacttaccaacctcctgtcctccaacttgtcctggctatcgttggatgtgtctgcggcgttttatcatcttcctcttcatcctgctgctatgcctcatcttcttgttggttcttctggactaccaaggtatgttgcccgtttgtcctctacttccaggatccacgaccaccagcacgggaccatgcaaaacctgcacaactcttgctcaaggaacctctatgtttccctcctgttgctgttccaaaccctcggacggaaactgcacctgtattcccatcccatcatcttgggctttaggaaaatacctatgggagtgggcctcagcccgtttctcctggctcagtttactagtgcaatttgttcagtggtgcgtagggctttcccccactgtctggcttttagttatatggatgatctggtattgggggccaaatctgtgcagcatcttgagtccctttataccgctgttaccaattttctgttatctgtgggtatccatttaaatactgctaaaacaaaaagatggggttactccctacatttcatgggttatgttattggtagttggggaacgttaccccaagatcatattgtacacaaaatcaaagattgttttcggaaacttcctgtaaatcgtccaattgattggaaagtttgtcaacgcattgtgggtcttttgggctttgcggcccctttcacccaatgtggttatcctgctctcatgcctttgtatacctgtattactgctaaacaggcgtttgtcttttcgccaacttacaaggcctttctctgtaaacaatacatgaacctttaccccgttgctcggcaacggccaggcctgtgccaagtgtttgctgacgcaacccccactggttggggcttggccattggccatcagcgcatgcgtggaacctttgtggctcctctgccgatccatactgcggaactccttgcagcctgtttcgctcgcagccggtctggagcgaacattatcggcacagacaactctgttgtcctctctaggaagtacacctcctttccatggctgctcggttgtgctgccaactggatcctgcgcgggacgtcctttgtttacgtcccgtcggcgctgaatcccgcggacgacccctcccggggtcgcttggggctgtaccgcccccttcttcgtctgccgttccagccgacaacgggtcgtacctctctttacgcggactccccgtctgttccttctcatctgccggaccgtgtgcacttcgcttcacctctgcacgtcgcatggagaccaccgtgaacgccccctggaatctgccaacagtcttacataagaggactcttggactttcaggacggtcaatgacctggatcgaagactacatcaaagactgtgtatttaaggactgggaggagctgggggaggagatcacgttaaaggtctttgtactaggaggctgtaggcataaattggtctgtgcaccagcaccatgcaactttttcacctctgcctaatcatcttttgttcatgtcccactgttcaagcctccaagctgtgccttgggtggctttggggcatggacattgacccttataaagaatttggagcttctgtggaattgctctcttttttgccttctgatttcttcccgtctgttcgggacctactcgacaccgcttcagccctgtaccgggatgctctagagtcaccggaacattgcacccccaatcataccgctctcaggcaagctattttgtgctggggtgagttaatgactttggcttcctgggtgggtaataatttggaagaccctgcagctagggatttagtagttaattatgtcaacactaatatgggcctaaaaattagacaactgttgtggtttcacatttcctgtcttacttttggaagagaaacagttcttgagtatttggtgtcctttggagtgtggattcgcactccacctgcttatagaccaccaaatgcccctatcctatccacacttccggaaactactgttgttagacgacgaggcaggtcccctagaagaagaactccctcgcctcgccgacgaaggtctcaatcgccgcgtcgcagaagatctcaatctccagcttcccaatgttagtattccttggactcataaggtgggaaattttacggggctctactcttctactgtacctgctttcaatcctaactggttaactccttcttttcctgatattcatttacatcaggatctgatatctaaatgtgaacaatttgtaggcccgctcactaaaaatgaattgagaagattaaaattggtcatgccagctagattttatcctaaggttaccaaatactttcctatggagaaagggattaaaccctattatcctgagcatgcagttaatcattattttaaaacaagacattatttgcatactttatggaaggcgggaatcttatataagagagaatccacacgtagcgcctcattttgtgggtcaccatattcctgggaacaagagctacagcatgggagcacctctctcaacgacaagaaggggcatgggactgaatctttctgtgcccaatcctctgggcttcttgccagaccatcagctggatccgctattcagagcaaattccagcagtcccgactgggacttcaacacaaacaaggacagttggccaatggcaaacaaggtaggagtgggaggctacggtccagggttcacacccccacacggtggcctgctggggtggagccctcaggcacagggtgttttaacaaccttgccagcagatccgcctcctgcttccaccaatcggcggtccgggagaaagccaaccccagtctctccacctctaagagacacacatccacaggccatgcagtggaa

SEQ ID NO: 673 - DNA, 3248 bp, Hepatitis B virus
  source 1..3248: mol_type = genomic DNA
ctctacagcattccaccaagctctacaaaatcccaaagtcaggggcctgtattttcctgctggtggctccagttcagggatagtgaaccctgttccgactattgcctctcacatctcgtcaatcttctccaggattggggaccctgcaccgaacatggagaacatcacatcaggattcctaggacccctgctcgtgttacaggcggggtttttcttgttgacaagaatcctcacaataccgcagagtctagactcgtggtggacttctctcaattttctagggggagtgcccgtgtgtcctggcctaaattcgcagtccccaacctccaatcactcaccaatctcctgtcctccaacttgtcctggctatcgctggatgtgtctgcggcgttttatcatattcctcttcatcctgctgctatgcctcatcttcttgttggttcttctggactatcaaggtatgttgcccgtttgtcctctgattccaggatcctcgaccaccagtacgggaccctgcaaaacctgcacgactcctgctcaaggcaactctatgtatccctcatgttgctgtacaaaaccttcggacggaaattgcacctgtattcccatcccatcatcttgggctttcgcaaaatacctatgggagtgggcctcagtccgtttctcttggctcagtttactagtgccatttgttcagtggttcgtagggctttcccccactgtctggctttcagctatatggatgatgtggtattgggggccaaatctgtacaacatcttgagtccctttataccgctgttaccaattttcttttgtctttgggtatacatctaaaccctaacaaaacaaaaagatggggttattccttaaattttatgggatatgtaattggaagttggggtactttgccacaagaacacatcacacagaaaattaagcaatgttttcggaaactccctgttaacaggccaattgattggaaagtctgtcaacgaataactggtctgttgggtttcgctgctccttttacccaatgtggttaccctgccttaatgcctttatatgcatgtatacaagctaagcaggcttttactttctcgccaacttataaggcctttctctgtaaacaatacatgaacctttaccccgttgctaggcaacggcccggtctgtgccaagtgtttgctgacgcaacccccactggttggggcttggccatcggccatcagcgcatgcgtggaacctttgtggctcctctgccgatccatactgcggaactcctagctgcttgttttgctcgcagccggtctggagcaaaactcattgggactgacaattctgtcgtcctttctcggaaatatacatcctttccatggctgctaggctgtgctgccaactggatccttcgcgggacgtcctttgtttacgtcccgtcagcgctgaatccagcggacgacccctcccggggccgtttggggctctgtcgcccccttctccgtctgccgttcctgccgaccacggggcgcacctctctttacgcggtctccccgtctgttccttctcatctgccggaccgtgtgcacttcgcttcacctctgcacgttacatggaaaccgccatgaacacctctcatcatctgccaaggcagttatataagaggactcttggactgtttgttatgtcaacaaccggggtggagaaatacttcaaggactgtgtttttgctgagtgggaagaattaggcaatgagtccaggttaatgacctttgtattaggaggctgtaggcataaattggtctgcgcaccagcaccatgtaactttttcacctctgcctaatcatctcttgttcatgtcctactgttcaagcctccaagctgtgccttgggtggctttagggcatggatagaacaactttgccatatggcctttttggcttagacattgacccttataaagaatttggagctactgtggagttgctctcgtttttgccttctgactttttcccgtctgttcgtgatcttctcgacaccgcttcagctttgtaccgggaatccttagagtcctctgatcattgttcgcctcaccatacagcactcaggcaagcaatcctgtgctggggtgagttgatgactctagctacctgggtgggtaataatttggaagatccagcatccagagatttggtggtcaattatgttaatactaatatgggtttaaaaatcaggcaactattgtggtttcacatttcctgtcttacttttgggagagaaaccgttcttgagtatttggtgtcttttggagtgtggattcgcactcctcctgcttatagaccaccaaatgcccctatcctatcaacacttccggagactactgttgttagacgaagaggcaggtcccctcgaagaagaactccctcgcctcgcagacgaagatctcaatcgccgcgtcgcagaagatctgcatctccagcttcccaatgttagtattccttggactcacaaggtgggaaactttacggggctgtattcttctactatacctgtctttaatcctgattggcaaactccttcttttccaaatatccatttgcatcaagacattataactaaatgtgaacaatttgtgggccctctcacagtaaatgagaaacgaagattaaaactagttatgcctgccagatttttcccaaactctactaaatatttaccattagacaaaggtatcaaaccgtattatccagaaaatgtagttaatcattacttccagaccagacattatttacataccctttggaaggcgggtattctatataagagagaaacatcccgtagcgcttcattttgtgggtcaccatatacttgggaacaagatctacagcatggggctttcttggacggtccctctcgagtggggaaagaacctttccaccagcaatcctctaggattccttcccgatcaccagttggacccagcattcagagcaaataccaacaatccagattgggacttcaatcccaaaaaggacccttggccagaggccaacaaggtaggagttggagcctatggacccgggttcacccctccacacggaggccttttggggtggagccctcagtctcagggcacactaacaactttgccagcagatccgcctcctgcctccaccaatcgtcagtcagggaggcagcctactcccatctctccaccactaagagacagtcatcctcaggccatgcagtggaa

SEQ ID NO: 674 - DNA, 3215 bp, Hepatitis B virus
  source 1..3215: mol_type = genomic DNA
ctcaacacagttccaccaagcactgttggatccgagagtaaggggtctgtattttcctgctggtggctccagttcagaaacacagaaccctgctccgactattgcctctctcacatcatcaatcttctcgaagactggggaccctgctatgaacatggagaacatcacatcaggactcctaggaccccttctcgtgttacaggcggtgtgtttcttgttgacaaaaatcctcacaataccacagagtctagactcgtggtggacttctctcaattttctaggggtaccacccgggtgtcctggccaaaattcgcagtccccaatctccaatcacttaccaacctcctgtcctccaacttgtcctggctatcgttggatgtgtctgcggcgttttatcatcttcctcttcatcctgctgctatgcctcatcttcttgttggttcttctggactatcaaggtatgttgcccgtgtgtcctctacttccaggatctacaaccaccagcacgggaccctgcaaaacctgcaccactcttgctcaaggaacctctatgtttccctcctgctgctgtaccaaaccttcggacggaaattgcacctgtattcccatcccatcatcttgggctttcggaaaatacctatgggagtgggcctcagcccgtttctcttggctcagtttactagtgcaatttgttcagtggtgcgtagggctttcccccactgtctggcttttagttatatggatgatttggtattgggggccaaatctgtgcagcatcttgagtccctttataccgctgttaccaattttttgttatctgtgggcatccatttgaacacagctaaaacaaaatggtggggttattccttacactttatgggttatataattgggagttgggggaccttgcctcaggaacatattgtgcataaaatcaaagattgctttcgcaaacttcccgtgaatagacccattgattggaaggtttgtcaacgcattgtgggtcttttgggctttgcagccccttttactcaatgtggttatcctgctctcatgcccttgtatgcctgtattaccgctaagcaggcttttgttttctcgccaacttacaaggcctttctctgtaaacaatacatgaacctttaccccgttgctcggcaacggccaggcctttgccaagtgtttgctgacgcaacccccactggctggggcttggcgattggccatcagcgcatgcgcggaacctttgtggctcctctgccgatccatactgcggaactcctagcagcttgtttcgctcgcagcaggtctggagcggacattatcggcactgacaactccgttgtcctttctcggaagtacacctccttcccatggctgctaggctgtgctgccaactggatcctgcgcgggacgtcctttgtctacgtcccgtcggcgctgaatcctgcggacgacccctctcgtggtcgcttggggctctgccgccctcttctccgcctgccgttccggccgacgacgggtcgcacctctctttacgcggactccccgcctgtgccttctcatctgccggcccgtgtgcacttcgcttcacctctgcacgtcgcatggagaccaccgtgaacgccccttggaacttgccaacaaccttacataagaggactcttggactttcgccccggtcaacgacctggattgaggaatacatcaaagactgtgtatttaaggactgggaggagtcgggggaggagttgaggttaaaggtctttgtattaggaggctgtaggcataaattggtctgttcaccagcaccatgcaactttttcacctctgcctaatcatcttttgttcatgtcccactgttcaagcctccaagctgtgccttgggtggctttggggcatggacattgacccttataaagaatttggagcttctgtggagttactctcatttttgccttctgacttcttcccgtctgtccgggacctactcgacaccgcttcagccctctaccgagatgccttagaatcacccgaacattgcacccccaaccacactgctctcaggcaagctattttgtgctggggtgagttgatgaccttggcttcctgggtgggcaataatttagaggatcctgcagcaagagatctagtagttaattatgtcaatactaacatgggcctaaaaattagacaattattatggtttcacatttcctgccttacatttggaagagaaactgtgcttgagtatttggtgtcttttggagtgtggattcgcactccacctgcttatagaccaccaaatgcccctatcctatcaacacttccggagactactgttgttagacaacgaggcagggcccctagaagaagaactccctcgcctcgcagacgaagatctcaatcaccgcgtcgcagaagatctcaatctccagcttcccaatgttagtattccttggactcataaggtgggaaactttaccggtctttactcctctactatacctgttttcaatcctgactggttaactccttcttttcctgacattcacttgcatcaagatctgatacaaaaatgtgaacaatttgtaggcccactcactacaaatgaaaggagacgattgaaactaattatgccagctaggttttatcccaaagttactaaatacttccctttggataaaggtattaagccttactatccagagaatgtggttaatcattactttaaaactagacattatttacatactttgtggaaggcaggaattctatataagagagaatccacacatagcgcctcattttgtgggtcaccatattcctgggaacaagagctacagcatgggagcacctctctcaacggcgagaaggggcatgggacagaatctttctgtgcccaatcctctgggattctttccagaccaccagttggatccactattcagagcaaattccagcagtcccgattgggacttcaacacaaacaaggacaattggccaatggcaaacaaggtaggagtgggaggcttcggtccagggttcacacccccacacggtggccttctggggtggagccctcaggcacagggcattctgacaacctcgccaccagatccacctcctgcttccaccaatcggaggtcaggaagaaagccaaccccagtctctccacctctaagggacacacatccacaggccatgcagtggaa

SEQ ID NO: 675 - DNA, 20 bp, Hepatitis B virus
  source 1..20: mol_type = genomic DNA
tttgtttacgtcccgtcggc

SEQ ID NO: 676 - DNA, 30 bp, Hepatitis B virus
  source 1..30: mol_type = genomic DNA
tttacgtcccgtcggcgctgaatcctgcgg

SEQ ID NO: 677 - DNA, 20 bp, Hepatitis B virus
  source 1..20: mol_type = genomic DNA
tttacgtcccgtcggcgctg

SEQ ID NO: 678 - DNA, 20 bp, Hepatitis B virus
  source 1..20: mol_type = genomic DNA
tttacgcggactccccgtct

SEQ ID NO: 679 - DNA, 20 bp, Hepatitis B virus
  source 1..20: mol_type = genomic DNA
ttgtttacgtcccgtcggcg

SEQ ID NO: 680 - DNA, 20 bp, Hepatitis B virus
  source 1..20: mol_type = genomic DNA
ttgttgacaagaatcctcac

SEQ ID NO: 681 - DNA, 19 bp, Hepatitis B virus
  source 1..19: mol_type = genomic DNA
ttgagagaagtccaccacg

SEQ ID NO: 682 - DNA, 30 bp, Hepatitis B virus
  source 1..30: mol_type = genomic DNA
ttctcctggctcagtttactagtgccattt

SEQ ID NO: 683 - DNA, 20 bp, Hepatitis B virus
  source 1..20: mol_type = genomic DNA
ttctcctggctcagtttact

SEQ ID NO: 684 - DNA, 20 bp, Hepatitis B virus
  source 1..20: mol_type = genomic DNA
ttacgtcccgtcggcgctga

SEQ ID NO: 685 - DNA, 20 bp, Hepatitis B virus
  source 1..20: mol_type = genomic DNA
tgtttacgtcccgtcggcgc

SEQ ID NO: 686 - DNA, 20 bp, Hepatitis B virus
  source 1..20: mol_type = genomic DNA
tgtgccttctcatctgccgg

SEQ ID NO: 687 - DNA, 20 bp, Hepatitis B virus
  source 1..20: mol_type = genomic DNA
tgtgcacttcgcttcacctc

SEQ ID NO: 688 - DNA, 20 bp, Hepatitis B virus
  source 1..20: mol_type = genomic DNA
tggtggacttctctcaattt

SEQ ID NO: 689 - DNA, 20 bp, Hepatitis B virus
  source 1..20: mol_type = genomic DNA
tggctcagtttactagtgcc

SEQ ID NO: 690 - DNA, 25 bp, Hepatitis B virus
  source 1..25: mol_type = genomic DNA
tggacttctctcaattttctagggg

SEQ ID NO: 691 - DNA, 20 bp, Hepatitis B virus
  source 1..20: mol_type = genomic DNA
tggacttctctcaattttct

SEQ ID NO: 692 - DNA, 20 bp, Hepatitis B virus
  source 1..20: mol_type = genomic DNA
tgccttctcatctgccggac

SEQ ID NO: 693 - DNA, 20 bp, Hepatitis B virus
  source 1..20: mol_type = genomic DNA
tgccggaccgtgtgcacttc

SEQ ID NO: 694 - DNA, 20 bp, Hepatitis B virus
  source 1..20: mol_type = genomic DNA
tgccgatccatactgcggaa

SEQ ID NO: 695 - DNA, 20 bp, Hepatitis B virus
  source 1..20: mol_type = genomic DNA
tgcacttcgcttcacctctg

SEQ ID NO: 696 - DNA, 20 bp, Hepatitis B virus
  source 1..20: mol_type = genomic DNA
tgacaagaatcctcacaata

SEQ ID NO: 697 - DNA, 20 bp, Hepatitis B virus
  source 1..20: mol_type = genomic DNA
tctttacgcggactccccgt

SEQ ID NO: 698 - DNA, 20 bp, Hepatitis B virus
  source 1..20: mol_type = genomic DNA
tcttgttgacaagaatcctc

SEQ ID NO: 699 - DNA, 20 bp, Hepatitis B virus
  source 1..20: mol_type = genomic DNA
tctgtgccttctcatctgcc

SEQ ID NO: 700 - DNA, 20 bp, Hepatitis B virus
  source 1..20: mol_type = genomic DNA
tctgccgatccatactgcgg

SEQ ID NO: 701 - DNA, 20 bp, Hepatitis B virus
  source 1..20: mol_type = genomic DNA
tctctttacgcggactcccc

SEQ ID NO: 702 - DNA, 20 bp, Hepatitis B virus
  source 1..20: mol_type = genomic DNA
tctcatctgccggaccgtgt

SEQ ID NO: 703 - DNA, 20 bp, Hepatitis B virus
  source 1..20: mol_type = genomic DNA
tcggcgctgaatcctgcgga

SEQ ID NO: 704 - DNA, 20 bp, Hepatitis B virus
  source 1..20: mol_type = genomic DNA
tcctggctcagtttactagt

SEQ ID NO: 705 - DNA, 20 bp, Hepatitis B virus
  source 1..20: mol_type = genomic DNA
tcctcacaataccgcagagt

SEQ ID NO: 706 - DNA, 20 bp, Hepatitis B virus
  source 1..20: mol_type = genomic DNA
tcccgtcggcgctgaatcct

SEQ ID NO: 707 - DNA, 20 bp, Hepatitis B virus
  source 1..20: mol_type = genomic DNA
tccatactgcggaactccta

SEQ ID NO: 708 - DNA, 20 bp, Hepatitis B virus
  source 1..20: mol_type = genomic DNA
tcatctgccggaccgtgtgc

SEQ ID NO: 709 - DNA, 22 bp, Hepatitis B virus
  source 1..22: mol_type = genomic DNA
tcatctcgaacgttcacagtca

SEQ ID NO: 710 - DNA, 20 bp, Hepatitis B virus
  source 1..20: mol_type = genomic DNA
tcagtttactagtgccattt

SEQ ID NO: 711 - DNA, 20 bp, Hepatitis B virus
  source 1..20: mol_type = genomic DNA
tattgtgaggattcttgtca

SEQ ID NO: 712 - DNA, 30 bp, Hepatitis B virus
  source 1..30: mol_type = genomic DNA
taggaggctgtaggcataaattggtctgcg

SEQ ID NO: 713 - DNA, 20 bp, Hepatitis B virus
  source 1..20: mol_type = genomic DNA
tacgtcccgtcggcgctgaa

SEQ ID NO: 714 - DNA, 20 bp, Hepatitis B virus
  source 1..20: mol_type = genomic DNA
tacgcggactccccgtctgt

SEQ ID NO: 715 - DNA, 20 bp, Hepatitis B virus
  source 1..20: mol_type = genomic DNA
gtttacgtcccgtcggcgct

SEQ ID NO: 716 - DNA, 20 bp, Hepatitis B virus
  source 1..20: mol_type = genomic DNA
gttggtgcacttcgcttcac

SEQ ID NO: 717 - DNA, 20 bp, Hepatitis B virus
  source 1..20: mol_type = genomic DNA
gttgacaagaatcctcacaa

SEQ ID NO: 718 - DNA, 19 bp, Hepatitis B virus
  source 1..19: mol_type = genomic DNA
gttcccagtatggatcggc

SEQ ID NO: 719 - DNA, 20 bp, Hepatitis B virus
  source 1..20: mol_type = genomic DNA
gtgtgcacttcgcttcacct

SEQ ID NO: 720 - DNA, 20 bp, Hepatitis B virus
  source 1..20: mol_type = genomic DNA
gtggtggacttctctcaatt

SEQ ID NO: 721 - DNA, 21 bp, Hepatitis B virus
  source 1..21: mol_type = genomic DNA
gtggacttctctcaattttct

SEQ ID NO: 722 - DNA, 20 bp, Hepatitis B virus
  source 1..20: mol_type = genomic DNA
gtggacttctctcaattttc

SEQ ID NO: 723 - DNA, 20 bp, Hepatitis B virus
  source 1..20: mol_type = genomic DNA
gtgccttctcatctgccgga

SEQ ID NO: 724 - DNA, 20 bp, Hepatitis B virus
  source 1..20: mol_type = genomic DNA
gtgcacttcgcttcacctct

SEQ ID NO: 725 - DNA, 20 bp, Hepatitis B virus
  source 1..20: mol_type = genomic DNA
gtgaagcgaagtgcacacgg

SEQ ID NO: 726 - DNA, 20 bp, Hepatitis B virus
  source 1..20: mol_type = genomic DNA
gtctgtgccttctcatctgc

SEQ ID NO: 727 - DNA, 20 bp, Hepatitis B virus
  source 1..20: mol_type = genomic DNA
gtcggcgctgaatcctgcgg

SEQ ID NO: 728 - DNA, 20 bp, Hepatitis B virus
  source 1..20: mol_type = genomic DNA
gtcccgtcggcgctgaatcc

SEQ ID NO: 729 - DNA, 20 bp, Hepatitis B virus
  source 1..20: mol_type = genomic DNA
gtattgtgaggattcttgtc

SEQ ID NO: 730 - DNA, 20 bp, Hepatitis B virus
  source 1..20: mol_type = genomic DNA
ggtggacttctctcaatttt

SEQ ID NO: 731 - DNA, 20 bp, Hepatitis B virus
  source 1..20: mol_type = genomic DNA
gggcgcacctctctttacgc

SEQ ID NO: 732 - DNA, 20 bp, Hepatitis B virus
  source 1..20: mol_type = genomic DNA
ggctgtaggcataaattggt

SEQ ID NO: 733 - DNA, 20 bp, Hepatitis B virus
  source 1..20: mol_type = genomic DNA
ggcgctgaatcctgcggacg

SEQ ID NO: 734 - DNA, 20 bp, Hepatitis B virus
  source 1..20: mol_type = genomic DNA
ggaggaaccttcagggaagg

SEQ ID NO: 735 - DNA, 20 bp, Hepatitis B virus
  source 1..20: mol_type = genomic DNA
ggactccccgtctgtgcctt

SEQ ID NO: 736 - DNA, 20 bp, Hepatitis B virus
  source 1..20: mol_type = genomic DNA
ggaccgtgtgcacttcgctt

SEQ ID NO: 737 - DNA, 19 bp, Hepatitis B virus
  source 1..19: mol_type = genomic DNA
gctgtaggcataaattggt

SEQ ID NO: 738 - DNA, 20 bp, Hepatitis B virus
  source 1..20: mol_type = genomic DNA
gctgaatcctgcggacgacc

SEQ ID NO: 739 - DNA, 20 bp, Hepatitis B virus
  source 1..20: mol_type = genomic DNA
gctcagtttactagtgccat

SEQ ID NO: 740 - DNA, 20 bp, Hepatitis B virus
  source 1..20: mol_type = genomic DNA
gcggactccccgtctgtgcc

SEQ ID NO: 741 - DNA, 20 bp, Hepatitis B virus
  source 1..20: mol_type = genomic DNA
gcgctgaatcctgcggacga

SEQ ID NO: 742 - DNA, 20 bp, Hepatitis B virus
  source 1..20: mol_type = genomic DNA
gcgcacctctctttacgcgg

SEQ ID NO: 743 - DNA, 20 bp, Hepatitis B virus
  source 1..20: mol_type = genomic DNA
gccttctcatctgccggacc

SEQ ID NO: 744 - DNA, 20 bp, Hepatitis B virus
  source 1..20: mol_type = genomic DNA
gccggaccgtgtgcacttcg

SEQ ID NO: 745 - DNA, 20 bp, Hepatitis B virus
  source 1..20: mol_type = genomic DNA
gccgatccatactgcggaac

SEQ ID NO: 746 - DNA, 19 bp, Hepatitis B virus
  source 1..19: mol_type = genomic DNA
gccgatccatactgcggaa

SEQ ID NO: 747 - DNA, 20 bp, Hepatitis B virus
  source 1..20: mol_type = genomic DNA
gcacttcgcttcacctctgc

SEQ ID NO: 748 - DNA, 20 bp, Hepatitis B virus
  source 1..20: mol_type = genomic DNA
gcactagtaaactgagccag

SEQ ID NO: 749 - DNA, 20 bp, Hepatitis B virus
  source 1..20: mol_type = genomic DNA
gcacctctctttacgcggac

SEQ ID NO: 750 - DNA, 20 bp, Hepatitis B virus
  source 1..20: mol_type = genomic DNA
gatccatactgcggaactcc

SEQ ID NO: 751 - DNA, 20 bp, Hepatitis B virus
  source 1..20: mol_type = genomic DNA
gactccccgtctgtgccttc

SEQ ID NO: 752 - DNA, 20 bp, Hepatitis B virus
  source 1..20: mol_type = genomic DNA
gaccgtgtgcacttcgcttc

SEQ ID NO: 753 - DNA, 20 bp, Hepatitis B virus
  source 1..20: mol_type = genomic DNA
gacaagaatcctcacaatac

SEQ ID NO: 754 - DNA, 20 bp, Hepatitis B virus
  source 1..20: mol_type = genomic DNA
gaatcctcacaataccgcag

SEQ ID NO: 755 - DNA, 20 bp, Hepatitis B virus
  source 1..20: mol_type = genomic DNA
gaaaattgagagaagtccac

SEQ ID NO: 756 - DNA, 20 bp, Hepatitis B virus
  source 1..20: mol_type = genomic DNA
ctttgtttacgtcccgtcgg

SEQ ID NO: 757 - DNA, 30 bp, Hepatitis B virus
  source 1..30: mol_type = genomic DNA
cttgttgacaagaatcctcacaataccgca

SEQ ID NO: 758 - DNA, 20 bp, Hepatitis B virus
  source 1..20: mol_type = genomic DNA
cttctcatctgccggaccgt

SEQ ID NO: 759 - DNA, 20 bp, Hepatitis B virus
  source 1..20: mol_type = genomic DNA
ctgtgccttctcatctgccg

SEQ ID NO: 760 - DNA, 20 bp, Hepatitis B virus
  source 1..20: mol_type = genomic DNA
ctggctcagtttactagtgc

SEQ ID NO: 761 - DNA, 19 bp, Hepatitis B virus
  source 1..19: mol_type = genomic DNA
ctggctcagtttactagtg

SEQ ID NO: 762 - DNA, 20 bp, Hepatitis B virus
  source 1..20: mol_type = genomic DNA
ctgccggaccgtgtgcactt

SEQ ID NO: 763 - DNA, 20 bp, Hepatitis B virus
  source 1..20: mol_type = genomic DNA
ctgccgatccatactgcgga

SEQ ID NO: 764 - DNA, 20 bp, Hepatitis B virus
  source 1..20: mol_type = genomic DNA
ctctgccgatccatactgcg

SEQ ID NO: 765 - DNA, 20 bp, Hepatitis B virus
  source 1..20: mol_type = genomic DNA
ctcctggctcagtttactag

SEQ ID NO: 766 - DNA, 20 bp, Hepatitis B virus
  source 1..20: mol_type = genomic DNA
ctccccgtctgtgccttctc

SEQ ID NO: 767 - DNA, 20 bp, Hepatitis B virus
  source 1..20: mol_type = genomic DNA
ctcacaataccgcagagtct

SEQ ID NO: 768 - DNA, 30 bp, Hepatitis B virus
  source 1..30: mol_type = genomic DNA
ctatcaaggtatgttgcccgtttgtcctct

SEQ ID NO: 769 - DNA, 20 bp, Hepatitis B virus
  source 1..20: mol_type = genomic DNA
cgtgtgcacttcgcttcacc

SEQ ID NO: 770 - DNA, 30 bp, Hepatitis B virus
  source 1..30: mol_type = genomic DNA
cgtggtggacttctctcaattttctagggg

SEQ ID NO: 771 - DNA, 25 bp, Hepatitis B virus
  source 1..25: mol_type = genomic DNA
cgtggtggacttctctcaattttct

SEQ ID NO: 772 - DNA, 20 bp, Hepatitis B virus
  source 1..20: mol_type = genomic DNA
cgtggtggacttctctcaat

SEQ ID NO: 773 - DNA, 20 bp, Hepatitis B virus
  source 1..20: mol_type = genomic DNA
cgtggtggacttctctcaat

SEQ ID NO: 774 - DNA, 20 bp, Hepatitis B virus
  source 1..20: mol_type = genomic DNA
cgtcggcgctgaatcctgcg

SEQ ID NO: 775 - DNA, 20 bp, Hepatitis B virus
  source 1..20: mol_type = genomic DNA
cgtcccgtcggcgctgaatc

SEQ ID NO: 776 - DNA, 20 bp, Hepatitis B virus
  source 1..20: mol_type = genomic DNA
cggggcgcacctctctttac

SEQ ID NO: 777 - DNA, 20 bp, Hepatitis B virus
  source 1..20: mol_type = genomic DNA
cggcgctgaatcctgcggac

SEQ ID NO: 778 - DNA, 20 bp, Hepatitis B virus
  source 1..20: mol_type = genomic DNA
cggactccccgtctgtgcct

SEQ ID NO: 779 - DNA, 20 bp, Hepatitis B virus
  source 1..20: mol_type = genomic DNA
cggaccgtgtgcacttcgct

SEQ ID NO: 780 - DNA, 20 bp, Hepatitis B virus
  source 1..20: mol_type = genomic DNA
cgctgaatcctgcggacgac

SEQ ID NO: 781 - DNA, 20 bp, Hepatitis B virus
  source 1..20: mol_type = genomic DNA
cgcggactccccgtctgtgc

SEQ ID NO: 782 - DNA, 20 bp, Hepatitis B virus
  source 1..20: mol_type = genomic DNA
cgcacctctctttacgcgga

SEQ ID NO: 783 - DNA, 20 bp, Hepatitis B virus
  source 1..20: mol_type = genomic DNA
cctttgtttacgtcccgtcg

SEQ ID NO: 784 - DNA, 20 bp, Hepatitis B virus
  source 1..20: mol_type = genomic DNA
ccttctcatctgccggaccg

SEQ ID NO: 785 - DNA, 20 bp, Hepatitis B virus
  source 1..20: mol_type = genomic DNA
ccttaggcactcctgcctct

SEQ ID NO: 786 - DNA, 20 bp, Hepatitis B virus
  source 1..20: mol_type = genomic DNA
cctggctcagtttactagtg

SEQ ID NO: 787 - DNA, 30 bp, Hepatitis B virus
  source 1..30: mol_type = genomic DNA
cctctgccgatccatactgcggaactccta

SEQ ID NO: 788 - DNA, 20 bp, Hepatitis B virus
  source 1..20: mol_type = genomic DNA
cctctgccgatccatactgc

SEQ ID NO: 789 - DNA, 20 bp, Hepatitis B virus
  source 1..20: mol_type = genomic DNA
cctctctttacgcggactcc

SEQ ID NO: 790 - DNA, 20 bp, Hepatitis B virus
  source 1..20: mol_type = genomic DNA
cctcacaataccgcagagtc

SEQ ID NO: 791 - DNA, 20 bp, Hepatitis B virus
  source 1..20: mol_type = genomic DNA
ccgtgtgcacttcgcttcac

SEQ ID NO: 792 - DNA, 20 bp, Hepatitis B virus
  source 1..20: mol_type = genomic DNA
ccgtgtgcacttcgctgttg

SEQ ID NO: 793 - DNA, 16 bp, Hepatitis B virus
  source 1..16: mol_type = genomic DNA
ccgtgtgcacttcgct

SEQ ID NO: 794 - DNA, 20 bp, Hepatitis B virus
  source 1..20: mol_type = genomic DNA
ccgtctgtgccttctcatct

SEQ ID NO: 795 - DNA, 20 bp, Hepatitis B virus
  source 1..20: mol_type = genomic DNA
ccgtcggcgctgaatcctgc

SEQ ID NO: 796 - DNA, 20 bp, Hepatitis B virus
  source 1..20: mol_type = genomic DNA
ccggtccgtgtgcacttcgc

SEQ ID NO: 797 - DNA, 20 bp, Hepatitis B virus
  source 1..20: mol_type = genomic DNA
ccggaccgtgtgcacttcgc

SEQ ID NO: 798 - DNA, 20 bp, Hepatitis B virus
  source 1..20: mol_type = genomic DNA
ccgatccatactgcggaact

SEQ ID NO: 799 - DNA, 20 bp, Hepatitis B virus
  source 1..20: mol_type = genomic DNA
cccgtcggcgctgaatcctg

SEQ ID NO: 800 - DNA, 20 bp, Hepatitis B virus
  source 1..20: mol_type = genomic DNA
ccccgtctgtgccttctcat

SEQ ID NO: 801 - DNA, 20 bp, Hepatitis B virus
  source 1..20: mol_type = genomic DNA
caggtcccctagaagaagaa

SEQ ID NO: 802 - DNA, 20 bp, Hepatitis B virus
  source 1..20: mol_type = genomic DNA
cacggggcgcacctctcttt

SEQ ID NO: 803 - DNA, 20 bp, Hepatitis B virus
  source 1..20: mol_type = genomic DNA
cacctctctttacgcggact

SEQ ID NO: 804 - DNA, 20 bp, Hepatitis B virus
  source 1..20: mol_type = genomic DNA
caagaatcctcacaataccg

SEQ ID NO: 805 - DNA, 20 bp, Hepatitis B virus
  source 1..20: mol_type = genomic DNA
atctgccggaccgtgtgcac

SEQ ID NO: 806 - DNA, 20 bp, Hepatitis B virus
  source 1..20: mol_type = genomic DNA
atcctcacaataccgcagag

SEQ ID NO: 807 - DNA, 30 bp, Hepatitis B virus
  source 1..30: mol_type = genomic DNA
agactcgtggtggacttctctcaattttct

SEQ ID NO: 808 - DNA, 20 bp, Hepatitis B virus
  source 1..20: mol_type = genomic DNA
agaatcctcacaataccgca

SEQ ID NO: 809 - DNA, 20 bp, Hepatitis B virus
  source 1..20: mol_type = genomic DNA
acgtcccgtcggcgctgaat

SEQ ID NO: 810 - DNA, 20 bp, Hepatitis B virus
  source 1..20: mol_type = genomic DNA
acgcggactccccgtctgtg

SEQ ID NO: 811 - DNA, 20 bp, Hepatitis B virus
  source 1..20: mol_type = genomic DNA
acctctctttacgcggactc

SEQ ID NO: 812 - DNA, 20 bp, Hepatitis B virus
  source 1..20: mol_type = genomic DNA
accgtgtgcacttcgcttca

SEQ ID NO: 813 - DNA, 20 bp, Hepatitis B virus
  source 1..20: mol_type = genomic DNA
accaatttatgcctacagcg

SEQ ID NO: 814 - DNA, 20 bp, Hepatitis B virus
  source 1..20: mol_type = genomic DNA
acaagaatcctcacaatacc

SEQ ID NO: 815 - DNA, 20 bp, Hepatitis B virus
  source 1..20: mol_type = genomic DNA
aatcctcacaataccgcaga

SEQ ID NO: 816 - DNA, 20 bp, Hepatitis B virus
  source 1..20: mol_type = genomic DNA
aaggtatgttgcccgtttgt

SEQ ID NO: 817 - DNA, 20 bp, Hepatitis B virus
  source 1..20: mol_type = genomic DNA
aagaatcctcacaataccgc

SEQ ID NO: 818 - skipped

SEQ ID NO: 819 - DNA, 20 bp, Hepatitis B virus
  source 1..20: mol_type = genomic DNA
ctagactcgtggtggacttc

SEQ ID NO: 820 - DNA, 20 bp, Hepatitis B virus
  source 1..20: mol_type = genomic DNA
cctgctgctatgcctcatct

SEQ ID NO: 821 - DNA, 20 bp, Hepatitis B virus
  source 1..20: mol_type = genomic DNA
ctgctgctatgcctcatctt

SEQ ID NO: 822 - DNA, 20 bp, Hepatitis B virus
  source 1..20: mol_type = genomic DNA
tgctgctatgcctcatcttc

SEQ ID NO: 823 - DNA, 20 bp, Hepatitis B virus
  source 1..20: mol_type = genomic DNA
gctgctatgcctcatcttct

SEQ ID NO: 824 - DNA, 20 bp, Hepatitis B virus
  source 1..20: mol_type = genomic DNA
ctgctatgcctcatcttctt

SEQ ID NO: 825 - DNA, 20 bp, Hepatitis B virus
  source 1..20: mol_type = genomic DNA
cctatgggagtgggcctcag

SEQ ID NO: 826 - DNA, 20 bp, Hepatitis B virus
  source 1..20: mol_type = genomic DNA
gccatttgttcagtggttcg

SEQ ID NO: 827 - DNA, 20 bp, Hepatitis B virus
  source 1..20: mol_type = genomic DNA
ggaggctgtaggcataaatt

SEQ ID NO: 828 - DNA, 20 bp, Hepatitis B virus
  source 1..20: mol_type = genomic DNA
gaggctgtaggcataaattg

SEQ ID NO: 829 - DNA, 20 bp, Hepatitis B virus
  source 1..20: mol_type = genomic DNA
aggctgtaggcataaattgg

SEQ ID NO: 830 - DNA, 20 bp, Hepatitis B virus
  source 1..20: mol_type = genomic DNA
ggctgtaggcataaattggt

SEQ ID NO: 831 - DNA, 20 bp, Hepatitis B virus
  source 1..20: mol_type = genomic DNA
ttcaagcctccaagctgtgc

SEQ ID NO: 832 - DNA, 20 bp, Hepatitis B virus
  source 1..20: mol_type = genomic DNA
tcaagcctccaagctgtgcc

SEQ ID NO: 833 - DNA, 20 bp, Hepatitis B virus
  source 1..20: mol_type = genomic DNA
caagcctccaagctgtgcct

SEQ ID NO: 834 - DNA, 20 bp, Hepatitis B virus
  source 1..20: mol_type = genomic DNA
aagcctccaagctgtgcctt

SEQ ID NO: 835 - DNA, 20 bp, Hepatitis B virus
  source 1..20: mol_type = genomic DNA
agcctccaagctgtgccttg

SEQ ID NO: 836 - DNA, 20 bp, Hepatitis B virus
  source 1..20: mol_type = genomic DNA
gcctccaagctgtgccttgg

SEQ ID NO: 837 - DNA, 20 bp, Hepatitis B virus
  source 1..20: mol_type = genomic DNA
gaactccctcgcctcgcaga

SEQ ID NO: 838 - DNA, 19 bp, Hepatitis B virus
  source 1..19: mol_type = genomic DNA
caccatattcttgggaaca
